(19) United States
(12) Patent Application Publication
(10) Pub. No.: US 2021/0363191 A1
(43) Pub. Date: Nov. 25, 2021

(54) ANTIBODY-EVADING VIRUS VECTORS

(71) Applicant: StrideBio, Inc., Research Triangle, NC (US)

(72) Inventors: Daniel McCoy, Durham, NC (US); Garrett E. Berry, Durham, NC (US)

(21) Appl. No.: 17/045,091

(22) PCT Filed: Apr. 3, 2019
(86) PCT No.: PCT/US2019/025617

§ 371 Date: Oct. 2, 2020

Related U.S. Application Data
(60) Provisional application No. 62/819,388, filed on Mar. 15, 2019.
(60) Provisional application No. 62/776,814, filed on Dec. 7, 2018.
(60) Provisional application No. 62/652,111, filed on Apr. 3, 2018.

(51) Int. Cl. C07K 14/005; C12N 7/00; C12N 15/86; A61K 38/46; A61K 31/7088; A61P 1/16

(52) U.S. Cl. CPC C07K 14/005; C12N 7/00; C12N 15/86; A61K 38/465; A61K 48/00; A61P 1/16; C12N 2750/14122; C12N 2750/14171; C12N 2750/14143; A61K 31/7088

(57) ABSTRACT

The present disclosure provides recombinant AAV capsid proteins comprising a modification in the amino acid sequence and virus vectors comprising the recombinant AAV capsid proteins. The disclosure also provides methods of administering the virus vectors and virus capsids of the disclosure to a cell or to a subject in vivo.

### CROSS REFERENCE TO RELATED APPLICATIONS

[0001] This application claims priority to U.S. Provisional Application Ser. No. 62/819,388, filed Mar. 15, 2019, U.S. Provisional Application Ser. No. 62/776,814, filed Dec. 7, 2018, U.S. Provisional Application Ser. No. 62/652,111, filed Apr. 3, 2018, each of which is incorporated by reference herein in its entirety for all purposes.

### FIELD OF THE DISCLOSURE

[0002] The present disclosure relates to modified capsid proteins from adeno-associated virus (AAV) and virus capsids and virus vectors comprising the same. In particular, the disclosure relates to modified AAV capsid proteins and capsids comprising the same that can be incorporated into virus vectors to confer a phenotype of evasion of neutralizing antibodies without decreased transduction efficiency.

### SEQUENCE LISTING

[0003] The instant application contains a Sequence Listing which has been submitted electronically in ASCII format and is hereby incorporated by reference in its entirety. Said ASCII copy, created on Apr. 3, 2019, is named STRD_006_03WO_SeqList_ST25.txt and is ˜2 MB in size.

### BACKGROUND

[0004] Host-derived pre-existing antibodies generated upon natural encounter of AAV or recombinant AAV vectors prevent first time as well as repeat administration of AAV vectors as vaccines and/or for gene therapy. Serological studies reveal a high prevalence of antibodies in the human population worldwide with about 67% of people having antibodies against AAV1, 72% against AAV2, and about 40% against AAV5 through AAV9.

[0005] Furthermore, in gene therapy, certain clinical scenarios involving gene silencing or tissue degeneration may require multiple AAV vector administrations to sustain long term expression of the transgene. To circumvent these issues, recombinant AAV vectors which evade antibody recognition (AAVe) are required. Such vectors will help a) expand the eligible cohort of patients suitable for AAV-based gene therapy and b) allow multiple, repeat administrations of AAV-based gene therapy vectors.

[0006] The present disclosure provides methods and compositions comprising an adeno-associated virus (AAV) capsid protein, comprising one or more amino acid substitutions, wherein the substitutions introduce into an AAV vector comprising these modified capsid proteins the ability to evade host antibodies.

### BRIEF SUMMARY

[0007] The present disclosure provides an adeno-associated virus (AAV) capsid proteins, comprising one or more amino acid modifications, wherein the one or more amino acid modifications modify one or more antigenic sites on the AAV capsid protein. In some embodiments wherein the AAV capsid proteins are incorporated into AAV vectors, the modification of the one or more antigenic sites results in evasion of neutralizing antibodies.

[0008] In some embodiments, the disclosure provides a recombinant adeno-associated virus (AAV) capsid protein, wherein the capsid protein comprises a substitution in an antigenic site of the AAV capsid protein, wherein the substitution has a sequence of any one of SEQ ID NO: 9, 10, 11, 12, 13, 14, 15, 16, 17, 297, 298, 299, or 411-421. In some embodiments, the AAV capsid protein is of an AAV serotype selected from AAV1, AAV2, AAV3, AAV4, AAV5, AAV6, AAV7, AAV8, AAV9, AAV10, AAV11, AAV12, AAVrh8, AAVrh10, AAVrh32.33, AAVrh74, Avian AAV or Bovine AAV. In some embodiments, the AAV capsid protein is chimeric.

[0009] In some embodiments, the disclosure provides a recombinant AAV capsid protein, wherein the AAV capsid protein comprises an amino acid sequence that has at least 90%, at least 95%, at least 96%, at least 97%, at least 98%, at least 99%, or 100% sequence identity, with any one of SEQ ID NOs: 18-80, 300-612, or 783-785.

[0010] The present disclosure also provides a nucleotide sequence, or an expression vector comprising the same, that encodes one or more of the AAV capsid proteins of the disclosure. The present disclosure also provides a cell that comprises one or more nucleotide sequences or expression vectors of the disclosure.

[0011] The present disclosure also provides an AAV capsid comprising the AAV capsid protein of this disclosure. Further provided herein is a viral vector comprising the AAV capsid of this disclosure as well as a composition comprising the AAV capsid protein, AAV capsid and/or viral vector of this disclosure in a pharmaceutically acceptable carrier.

[0012] The present disclosure additionally provides a method of introducing a nucleic acid into a cell in the presence of antibodies against the AAV capsid, comprising contacting the cell with the viral vector of this disclosure. The cell can be in a subject and in some embodiments, the subject can be a human subject.

[0013] In some embodiments, a method of treating a patient in need thereof is provided, the method comprising administering to the patient a therapeutically effective amount of an AAV viral vector of the disclosure.

[0014] These and other aspects are addressed in more detail in the detailed description set forth below.

### BRIEF DESCRIPTION OF THE DRAWINGS

[0015] FIG. 1A and FIG. 1B. Bubble plots showing analysis of library diversity, directed evolution and enrichment of novel antigenic footprints. Parental (FIG. 1A) and evolved (FIG. 1B) AAV libraries were subjected to high-throughput sequencing using the Illumina MiSeq platform. Following analysis with a custom Perl script, enriched amino acid sequences were plotted. Each bubble represents a distinct capsid amino acid sequence with the radius of the bubble proportional to the number of reads for that variant in the respective library. The y-axis represents the absolute number of reads, transformed to log base 2. Data are spread along the x-axis for ease of visualization. The percent reduction in unique clones (93.4%) demonstrates that numerous “un-fit” sequences were removed after a first round of evolution.

[0016] FIG. 2A, FIG. 2B, FIG. 2C, and FIG. 2D. FIG. 2A is a bubble plot showing the parental (input) library for the first round of evolution. FIG. 2B is a bubble plot showing the output library for the first round of evolution, which was used as the input library for the second round of evolution. FIG. 2C is a bubble blot showing the output library for the second round of evolution, which was used as the input library for the third round of evolution. FIG. 2D is a bubble plot showing the output library for the third round of evolution, which represents a 97.3% overall reduction in unique clones compared to the parental library shown in FIG. 2A. Notably, FIGS. 2A and 2B show the same data as in FIG. 1A and FIG. 1B, respectively, but the data has been normalized to percent total reads, allowing for longitudinal comparison across subsequent rounds of evolution.

[0017] FIG. 3. Luciferase expression in human hepatocytes (HepG2, Huh7) after infection by recombinant AAVs (AAV-SB1, AAV-SB2, AAV-SB3, AAV-SB4, AAV-SB5) at a dose of 10,000 vg/cell.

[0018] FIG. 4. Neutralization of recombinant AAVs (AAV-SB1, AAV-SB2, AAV-SB3, AAV-SB4, AAV-SB5) by human intravenous immunoglobulin (IVIG) compared to neutralization of parental AAV8. Data are presented as transduction after IVIG treatment as a percentage of transduction without IVIG treatment.

[0019] FIG. 5. Curve showing percent transduction (i.e. extent of neutralization) of parental AAV8 and AAV-SB1 after treatment with various doses of IVIG (0-4 mg/mL).

[0020] FIG. 6A. Percentage of donor samples (100 samples total) that were neutralizing and non-neutralizing to the indicated capsids. FIG. 6B. Breakdown of seropositive donor samples by age groups.

[0021] FIG. 7. Representative immunohistochemistry (IHC) images of liver from normal mice after infection with either parental AAV8 or AAV-SB1 at a 3×10¹² vg/mL dose.

[0022] FIG. 8. Representative fluorescent microscopy images of U87 cells 48 hours after transduction with parental AAV8, AAV-SB1 or AAV-SB6 vectors packaging GFP at an MOI of 40,000. A representative light microscopy image is also shown for reference.

### DETAILED DESCRIPTION

[0023] Unless otherwise defined, all technical and scientific terms used herein have the same meaning as commonly understood by one of ordinary skill in the art to which this disclosure belongs. The terminology used in the detailed description herein is for the purpose of describing particular embodiments only and is not intended to be limiting.

[0024] All publications, patent applications, patents, GenBank or other accession numbers and other references mentioned herein are incorporated by reference herein in their entirety.

[0025] The designation of all amino acid positions in the AAV capsid proteins in the disclosure and the appended claims is with respect to VP1 capsid subunit numbering. It will be understood by those skilled in the art that the modifications described herein if inserted into the AAV cap gene may result in modifications in the VP1, VP2 and/or VP3 capsid subunits. Alternatively, the capsid subunits can be expressed independently to achieve modification in only one or two of the capsid subunits (VP1, VP2, VP3, VP1+VP2, VP1+VP3, or VP2+VP3).

### Definitions

[0026] The following terms are used in the description herein and the appended claims:

[0027] The singular forms “a,” “an” and “the” are intended to include the plural forms as well, unless the context clearly indicates otherwise.

[0028] Furthermore, the term “about” as used herein when referring to a measurable value such as an amount of the length of a polynucleotide or polypeptide sequence, dose, time, temperature, and the like, is meant to encompass variations of ±20%, ±10%, ±5%, ±1%, ±0.5%, or even ±0.1% of the specified amount.

[0029] Also as used herein, “and/or” refers to and encompasses any and all possible combinations of one or more of the associated listed items, as well as the lack of combinations when interpreted in the alternative (“or”).

[0030] Unless the context indicates otherwise, it is specifically intended that the various features described herein can be used in any combination.

[0031] Moreover, the present disclosure also contemplates that in some embodiments, any feature or combination of features set forth herein can be excluded or omitted. To illustrate further, if, for example, the specification indicates that a particular amino acid can be selected from A, G, I, L and/or V, this language also indicates that the amino acid can be selected from any subset of these amino acid(s) for example A, G, I or L; A, G, I or V; A or G; only L; etc., as if each such subcombination is expressly set forth herein. Moreover, such language also indicates that one or more of the specified amino acids can be disclaimed. For example, in particular embodiments the amino acid is not A, G or I; is not A; is not G or V; etc., as if each such possible disclaimer is expressly set forth herein.

[0032] As used herein, the terms “reduce,” “reduces,” “reduction” and similar terms mean a decrease of at least about 10%, about 15%, about 20%, about 25%, about 35%, about 50%, about 75%, about 80%, about 85%, about 90%, about 95%, about 97% or more.

[0033] As used herein, the terms “enhance,” “enhances,” “enhancement” and similar terms indicate an increase of at least about 10%, about 15%, about 20%, about 25%, about 50%, about 75%, about 100%, about 150%, about 200%, about 300%, about 400%, about 500% or more.

[0034] The term “parvovirus” as used herein encompasses the family Parvoviridae, including autonomously replicating parvoviruses and dependoviruses. The autonomous parvoviruses include members of the genera Protoparvovirus, Erythroparvovirus, Bocaparvovirus, and Densovirus subfamily. Exemplary autonomous parvoviruses include, but are not limited to, minute virus of mouse, bovine parvovirus, canine parvovirus, chicken parvovirus, feline panleukopenia virus, feline parvovirus, goose parvovirus, H1 parvovirus, muscovy duck parvovirus, B19 virus, and any other autonomous parvovirus now known or later discovered. Other autonomous parvoviruses are known to those skilled in the art. See, e.g., BERNARD N. FIELDS et al, VIROLOGY, volume 2, chapter 69 (4th ed., Lippincott-Raven Publishers; Cotmore et al. Archives of Virology DOI 10.1007/s00705-013-1914-I).

[0035] As used herein, the term “adeno-associated virus” (AAV), includes but is not limited to, AAV type 1, AAV type 2, AAV type 3 (including types 3A and 3B), AAV type 4, AAV type 5, AAV type 6, AAV type 7, AAV type 8, AAV type 9, AAV type 10, AAV type 11, AAV type 12, AAV type 13, AAV type rh32.33, AAV type rh8, AAV type rh10, AAV type rh74, AAV type hu.68, avian AAV, bovine AAV, canine AAV, equine AAV, ovine AAV, snake AAV, bearded dragon AAV, AAV2i8, AAV2g9, AAV-LK03, AAV7m8, AAV Anc80, AAV PHP. B, and any other AAV now known or later discovered. See, e.g., BERNARD N. FIELDS et al., VIROLOGY, volume 2, chapter 69 (4th ed., Lippincott-Raven Publishers). A number of AAV serotypes and clades have been identified (see, e.g., Gao et al, (2004) J. Virology 78:6381-6388; Moris et al, (2004) Virology 33: 375-383; and Table 2).

[0036] As used herein, the term “chimeric AAV” refers to an AAV comprising a capsid protein with regions, domains, individual amino acids that are derived from two or more different serotypes of AAV. In some embodiments, a chimeric AAV comprises a capsid protein comprised of a first region that is derived from a first AAV serotype and a second region that is derived from a second AAV serotype. In some embodiments, a chimeric AAV comprises a capsid protein comprised of a first region that is derived from a first AAV serotype, a second region that is derived from a second AAV serotype, and a third region that is derived from a third AAV serotype. In some embodiments, the chimeric AAV may comprise regions, domains, individual amino acids derived from two or more of AAV1, AAV2, AAV3, AAV4, AAV5, AAV6, AAV7, AAV8, AAV9, AAV10, AAV11, and/or AAV12. For example, the chimeric AAV may include regions, domains, and/or individual amino acids from a first and a second AAV serotype as shown below (Table 1), wherein AAVX+Y indicates a chimeric AAV including sequences derived from AAVX and AAVY.

TABLE 1
Chimeric AAVs

| | | Second AAV Serotype | | | | | | |
|---|---|---|---|---|---|---|---|---|
| | | AAV1 | AAV2 | AAV3 | AAV4 | AAV5 | AAV6 | AAV7 |
| First AAV | AAV1 | x | AAV1 + 2 | AAV1 + 3 | AAV1 + 4 | AAV1 + 5 | AAV1 + 6 | AAV1 + 7 |
| Sertoype | AAV2 | AAV2 + 1 | x | AAV2 + 3 | AAV2 + 4 | AAV2 + 5 | AAV2 + 6 | AAV2 + 7 |
| | AAV3 | AAV3 + 1 | AAV3 + 2 | x | AAV3 + 4 | AAV3 + 5 | AAV3 + 6 | AAV3 + 7 |
| | AAV4 | AAV4 + 1 | AAV4 + 2 | AAV4 + 3 | x | AAV4 + 5 | AAV4 + 6 | AAV4 + 7 |
| | AAV5 | AAV5 + 1 | AAV5 + 2 | AAV5 + 3 | AAV5 + 4 | x | AAV5 + 6 | AAV5 + 7 |
| | AAV6 | AAV6 + 1 | AAV5 + 2 | AAV6 + 3 | AAV6 + 4 | AAV6 + 5 | x | AAV6 + 7 |
| | AAV7 | AAV7 + 1 | AAV7 + 2 | AAV7 + 3 | AAV7 + 4 | AAV7 + 5 | AAV7 + 6 | x |
| | AAV8 | AAV8 + 1 | AAV8 + 2 | AAV8 + 3 | AAV8 + 4 | AAV8 + 5 | AAV8 + 6 | AAV8 + 7 |
| | AAV9 | AAV9 + 1 | AAV9 + 2 | AAV9 + 3 | AAV9 + 4 | AAV9 + 5 | AAV9 + 6 | AAV9 + 7 |
| | AAV10 | AAV10 + 1 | AAV10 + 2 | AAV10 + 3 | AAV10 + 4 | AAV10 + 5 | AAV10 + 6 | AAV10 + 7 |
| | AAV11 | AAV11 + 1 | AAV11 + 2 | AAV11 + 3 | AAV11 + 4 | AAV11 + 5 | AAV11 + 6 | AAV11 + 7 |
| | AAV12 | AAV12 + 1 | AAV12 + 2 | AAV12 + 3 | AAV12 + 4 | AAV12 + 5 | AAV12 + 6 | AAV12 + 7 |

| | | Second AAV Serotype | | | | |
|---|---|---|---|---|---|---|
| | | AAV8 | AAV9 | AAV10 | AAV11 | AAV12 |
| First AAV | AAV1 | AAV1 + 8 | AAV1 + 9 | AAV1 + 10 | AAV1 + 11 | AAV1 + 12 |
| Sertoype | AAV2 | AAV2 + 8 | AAV2 + 9 | AAV2 + 10 | AAV2 + 11 | AAV2 + 12 |
| | AAV3 | AAV3 + 8 | AAV3 + 9 | AAV3 + 10 | AAV3 + 11 | AAV3 + 12 |
| | AAV4 | AAV4 + 8 | AAV4 + 9 | AAV4 + 10 | AAV4 + 11 | AAV4 + 12 |
| | AAV5 | AAV5 + 8 | AAV5 + 9 | AAV5 + 10 | AAV5 + 11 | AAV5 + 12 |
| | AAV6 | AAV6 + 8 | AAV5 + 9 | AAV6 + 10 | AAV6 + 11 | AAV6 + 12 |
| | AAV7 | AAV7 + 8 | AAV7 + 9 | AAV7 + 10 | AAV7 + 11 | AAV7 + 12 |
| | AAV8 | x | AAV8 + 9 | AAV8 + 10 | AAV8 + 11 | AAV8 + 12 |
| | AAV9 | AAV9 + 8 | x | AAV9 + 10 | AAV9 + 11 | AAV9 + 12 |
| | AAV10 | AAV10 + 8 | AAV10 + 9 | x | AAV10 + 11 | AAV10 + 12 |
| | AAV11 | AAV11 + 8 | AAV11 + 9 | AAV11 + 10 | x | AAV11 + 12 |
| | AAV12 | AAV12 + 8 | AAV12 + 9 | AAV12 + 10 | AAV12 + 11 | x |

[0037] By including individual amino acids or regions from multiple AAV serotypes in one capsid protein, capsid proteins that have multiple desired properties that are separately derived from the multiple AAV serotypes may be obtained.

[0038] The genomic sequences of various serotypes of AAV and the autonomous parvoviruses, as well as the sequences of the native terminal repeats (TRs), Rep proteins, and capsid subunits are known in the art. Such sequences may be found in the literature or in public databases such as GenBank. See, e.g., GenBank Accession Numbers NC_002077, NC_001401, NC_001729, NC_001863, NC_001829, NC_001862, NC_000883, NC_001701, NC_001510, NC_006152, NC_006261, AF063497, U89790, AF043303, AF028705, AF028704, J02275, J01901, J02275, X01457, AF288061, AH009962, AY028226, AY028223, NC_001358, NC_001540, AF513851, AF513852, AY530579; the disclosures of which are incorporated by reference herein for teaching parvovirus and AAV nucleic acid and amino acid sequences. See also, e.g., Srivistava et al., (1983) J. Virology 45:555; Chiorini et al, (1998) J Virology 71:6823; Chiorini et al., (1999) J. Virology 73: 1309; Bantel-Schaal et al., (1999) J Virology 73:939; Xiao et al, (1999) J Virology 73:3994; Muramatsu et al., (1996) Virology 221:208; Shade et al, (1986) J. Virol. 58:921; Gao et al, (2002) Proc. Nat. Acad. Sci. USA 99:11854; Moris et al, (2004) Virology 33:375-383; international patent publications WO 00/28061, WO 99/61601, WO 98/11244; and U.S. Pat. No. 6,156,303; the disclosures of which are incorporated by reference herein for teaching parvovirus and AAV nucleic acid and amino acid sequences. See also Table 2. The capsid structures of autonomous parvoviruses and AAV are described in more detail in BERNARD N. FIELDS et al., VIROLOGY, volume 2, chapters 69 & 70 (4th ed., Lippincott-Raven Publishers). See also, description of the crystal structure of AAV2 (Xie et al., (2002) Proc. Nat. Acad. Sci. 99: 10405-10), AAV9 (DiMattia et al., (2012) J. Virol. 86:6947-6958), AAV8 (Nam et al, (2007) J. Virol. 81: 12260-12271), AAV6 (Ng et al., (2010) J. Virol. 84:12945-12957), AAVS (Govindasamy et al. (2013) J. Virol. 87, 11187-11199), AAV4 (Govindasamy et al. (2006) J. Virol. 80:11556-11570), AAV3B (Lerch et al., (2010) Virology 403:26-36), BPV (Kailasan et al., (2015) J. Virol. 89:2603-2614) and CPV (Xie et al, (1996) J. Mol. Biol. 6:497-520 and Tsao et al, (1991) Science 251:1456-64).

TABLE 2

| | | | | | GenBank |
|---|---|---|---|---|---|
| | GenBank | | GenBank | | Accession |
| Complete | Accession | | Accession | | Number |
| Genomes | Number | Clade C | Number | Rh57 | AY530569 |
| Adeno-associated | NC_002077, | Hu9 | AY530629 | Rh50 | AY530563 |
| virus 1 | AF063497 | | | | |
| Adeno-associated | NC_001401 | Hu10 | AY530576 | Rh49 | AY530562 |
| virus 2 | | | | | |
| Adeno-associated | NC_001729 | Hu11 | AY530577 | Hu39 | AY530601 |
| virus 3 | | | | | |
| Adeno-associated | NC_001863 | Hu53 | AY530615 | Rh58 | AY530570 |
| virus 3B | | | | | |
| Adeno-associated | NC_001829 | Hu55 | AY530617 | Rh61 | AY530572 |
| virus 4 | | | | | |
| Adeno-associated | Y18065, | Hu54 | AY530616 | Rh52 | AY530565 |
| virus 5 | AF085716 | | | | |
| Adeno-associated | NC_001862 | Hu7 | AY530628 | Rh53 | AY530566 |
| virus 6 | | | | | |
| Avian AAV ATCC | AY186198, | Hu18 | AY530583 | Rh51 | AY530564 |
| VR-865 | AY629583, | | | | |
| | NC_004828 | | | | |
| Avian AAV strain | NC_006263, | Hu15 | AY530580 | Rh64 | AY530574 |
| DA-1 | AY629583 | | | | |
| Bovine AAV | NC_005889, | Hu16 | AY530581 | Rh43 | AY530560 |
| | AY388617, | | | | |
| | AAR26465 | | | | |
| AAV11 | AAT46339, | Hu25 | AY530591 | AAV8 | AF513852 |
| | AY631966 | | | | |
| AAV12 | ABI16639, | Hu60 | AY530622 | Rh8 | AY242997 |
| | DQ813647 | | | | |
| Clade A | | Ch5 | AY243021 | Rh1 | AY530556 |
| AAV1 | NC_002077, | Hu3 | AY530595 | Clade F | |
| | AF063497 | | | | |
| AAV6 | NC_001862 | Hu1 | AY530575 | Hu14 | AY530579 |
| | | | | (AAV9) | |
| Hu.48 | AY530611 | Hu4 | AY530602 | Hu31 | AY530596 |
| Hu 43 | AY530606 | Hu2 | AY530585 | Hu32 | AY530597 |
| Hu 44 | AY530607 | Hu61 | AY530623 | HSC1 | MI332400.1 |
| Hu 46 | AY530609 | Clade D | | HSC2 | MI332401.1 |
| Clade B | | Rh62 | AY530573 | HSC3 | MI332402.1 |
| Hu. 19 | AY530584 | Rh48 | AY530561 | HSC4 | MI332403.1 |
| Hu. 20 | AY530586 | Rh54 | AY530567 | HSC5 | MI332405.1 |
| Hu 23 | AY530589 | Rh55 | AY530568 | HSC6 | MI332404.1 |
| Hu22 | AY530588 | Cy2 | AY243020 | HSC7 | MI332407.1 |
| Hu24 | AY530590 | AAV7 | AF513851 | HSC8 | MI332408.1 |
| Hu21 | AY530587 | Rh35 | AY243000 | HSC9 | MI332409.1 |
| Hu27 | AY530592 | Rh37 | AY242998 | HSC11 | MI332406.1 |
| Hu28 | AY530593 | Rh36 | AY242999 | HSC12 | MI332410.1 |
| Hu 29 | AY530594 | Cy6 | AY243016 | HSC13 | MI332411.1 |
| Hu63 | AY530624 | Cy4 | AY243018 | HSC14 | MI332412.1 |
| Hu64 | AY530625 | Cy3 | AY243019 | HSC15 | MI332413.1 |
| Hu13 | AY530578 | Cy5 | AY243017 | HSC16 | MI332414.1 |
| Hu56 | AY530618 | Rh13 | AY243013 | HSC17 | MI332415.1 |
| Hu57 | AY530619 | Clade E | | Hu68 | |
| Hu49 | AY530612 | Rh38 | AY530558 | Clonal | |
| | | | | Isolate | |
| Hu58 | AY530620 | Hu66 | AY530626 | AAV5 | Y18065, |
| | | | | | AF085716 |
| Hu34 | AY530598 | Hu42 | AY530605 | AAV 3 | NC_001729 |
| Hu35 | AY530599 | Hu67 | AY530627 | AAV 3B | NC_001863 |
| AAV2 | NC_001401 | Hu40 | AY530603 | AAV4 | NC_001829 |
| Hu45 | AY530608 | Hu41 | AY530604 | Rh34 | AY243001 |
| Hu47 | AY530610 | Hu37 | AY530600 | Rh33 | AY243002 |
| Hu51 | AY530613 | Rh40 | AY530559 | Rh32 | AY243003 |
| Hu52 | AY530614 | Rh2 | AY243007 | Others | |
| Hu T41 | AY695378 | Bb1 | AY243023 | Rh74 | |
| Hu S17 | AY695376 | Bb2 | AY243022 | Bearded | |
| | | | | Dragon | |
| | | | | AAV | |
| Hu T88 | AY695375 | Rh10 | AY243015 | Snake | NC_006148.1 |
| | | | | AAV | |
| Hu T71 | AY695374 | Hu17 | AY530582 | | |
| Hu T70 | AY695373 | Hu6 | AY530621 | | |
| Hu T40 | AY695372 | Rh25 | AY530557 | | |
| Hu T32 | AY695371 | Pi2 | AY530554 | | |
| Hu T17 | AY695370 | Pi1 | AY530553 | | |
| Hu LG15 | AY695377 | Pi3 | AY530555 | | |

[0039] The term “tropism” as used herein refers to preferential entry of the virus into certain cells or tissues, optionally followed by expression (e.g., transcription and, optionally, translation) of a sequence(s) carried by the viral genome in the cell, e.g., for a recombinant virus, expression of a heterologous nucleic acid(s) of interest.

[0040] Those skilled in the art will appreciate that transcription of a heterologous nucleic acid sequence from the viral genome may not be initiated in the absence of trans-acting factors, e.g., for an inducible promoter or otherwise regulated nucleic acid sequence. In the case of a rAAV genome, gene expression from the viral genome may be from a stably integrated provirus, from a non-integrated episome, as well as any other form in which the virus may take within the cell.

[0041] As used here, “systemic tropism” and “systemic transduction” (and equivalent terms) indicate that the virus capsid or virus vector of the disclosure exhibits tropism for or transduces, respectively, tissues throughout the body (e.g., brain, lung, skeletal muscle, heart, liver, kidney and/or pancreas). In embodiments, systemic transduction of muscle tissues (e.g., skeletal muscle, diaphragm and cardiac muscle) is observed. In other embodiments, systemic transduction of skeletal muscle tissues achieved. For example, in particular embodiments, essentially all skeletal muscles throughout the body are transduced (although the efficiency of transduction may vary by muscle type). In particular embodiments, systemic transduction of limb muscles, cardiac muscle and diaphragm muscle is achieved. Optionally, the virus capsid or virus vector is administered via a systemic route (e.g., systemic route such as intravenously, intra-articularly or intra-lymphatically).

[0042] Alternatively, in other embodiments, the capsid or virus vector is delivered locally (e.g., to the footpad, intramuscularly, intradermally, subcutaneously, topically).

[0043] Unless indicated otherwise, “efficient transduction” or “efficient tropism,” or similar terms, can be determined by reference to a suitable control (e.g., at least about 50%, about 60%, about 70%, about 80%, about 85%, about 90%, about 95% or more of the transduction or tropism, respectively, of the control). In particular embodiments, the virus vector efficiently transduces or has efficient tropism for skeletal muscle, cardiac muscle, diaphragm muscle, pancreas (including β-islet cells), spleen, the gastrointestinal tract (e.g., epithelium and/or smooth muscle), cells of the central nervous system, lung, joint cells, and/or kidney. Suitable controls will depend on a variety of factors including the desired tropism profile. For example, AAV8 and AAV9 are highly efficient in transducing skeletal muscle, cardiac muscle and diaphragm muscle, but have the disadvantage of also transducing liver with high efficiency. Thus, viral vectors can be identified that demonstrate the efficient transduction of skeletal, cardiac and/or diaphragm muscle of AAV8 or AAV9, but with a much lower transduction efficiency for liver. Further, because the tropism profile of interest may reflect tropism toward multiple target tissues, it will be appreciated that a suitable vector may represent some tradeoffs. To illustrate, a virus vector of the disclosure may be less efficient than AAV8 or AAV9 in transducing skeletal muscle, cardiac muscle and/or diaphragm muscle, but because of low level transduction of liver, may nonetheless be very desirable.

[0044] Similarly, it can be determined if a virus “does not efficiently transduce” or “does not have efficient tropism” for a target tissue, or similar terms, by reference to a suitable control. In particular embodiments, the virus vector does not efficiently transduce (i.e., has does not have efficient tropism) for liver, kidney, gonads and/or germ cells. In particular embodiments, undesirable transduction of tissue(s) (e.g., liver) is about 20% or less, about 10% or less, about 5% or less, about 1% or less, about 0.1% or less of the level of transduction of the desired target tissue(s) (e.g., skeletal muscle, diaphragm muscle, cardiac muscle and/or cells of the central nervous system).

[0045] As used herein, the term “polypeptide” encompasses both peptides and proteins, unless indicated otherwise.

[0046] A “polynucleotide” is a sequence of nucleotide bases, and may be RNA, DNA or DNA-RNA hybrid sequences (including both naturally occurring and non-naturally occurring nucleotide), but in representative embodiments are either single or double stranded DNA sequences.

[0047] As used herein, an “isolated” polynucleotide (e.g., an “isolated DNA” or an “isolated RNA”) means a polynucleotide at least partially separated from at least some of the other components of the naturally occurring organism or virus, for example, the cell or viral structural components or other polypeptides or nucleic acids commonly found associated with the polynucleotide. In representative embodiments an “isolated” nucleotide is enriched by at least about 10-fold, about 100-fold, about 1000-fold, about 10,000-fold or more as compared with the starting material.

[0048] Likewise, an “isolated” polypeptide means a polypeptide that is at least partially separated from at least some of the other components of the naturally occurring organism or virus, for example, the cell or viral structural components or other polypeptides or nucleic acids commonly found associated with the polypeptide. In representative embodiments an “isolated” polypeptide is enriched by at least about 10-fold, about 100-fold, about 1000-fold, about 10,000-fold or more as compared with the starting material.

[0049] As used herein, by “isolate” or “purify” (or grammatical equivalents) a virus vector, it is meant that the virus vector is at least partially separated from at least some of the other components in the starting material. In representative embodiments an “isolated” or “purified” virus vector is enriched by at least about 10-fold, about 100-fold, about 1000-fold, about 10,000-fold or more as compared with the starting material.

[0050] A “therapeutic polypeptide” is a polypeptide that can alleviate, reduce, prevent, delay and/or stabilize symptoms that result from an absence or defect in a protein in a cell or subject and/or is a polypeptide that otherwise confers a benefit to a subject, e.g., anti-cancer effects or improvement in transplant survivability.

[0051] By the terms “treat,” “treating” or “treatment of” (and grammatical variations thereof) it is meant that the severity of the subject's condition is reduced, at least partially improved or stabilized and/or that some alleviation, mitigation, decrease or stabilization in at least one clinical symptom is achieved and/or there is a delay in the progression of the disease or disorder.

[0052] The terms “prevent,” “preventing” and “prevention” (and grammatical variations thereof) refer to prevention and/or delay of the onset of a disease, disorder and/or a clinical symptom(s) in a subject and/or a reduction in the severity of the onset of the disease, disorder and/or clinical symptom(s) relative to what would occur in the absence of the methods of the disclosure. The prevention can be complete, e.g., the total absence of the disease, disorder and/or clinical symptom(s). The prevention can also be partial, such that the occurrence of the disease, disorder and/or clinical symptom(s) in the subject and/or the severity of onset is less than what would occur in the absence of the present disclosure.

[0053] “Therapeutically effective amount” as used herein refers to an amount that, when administered to a subject for treating a disease, or at least one of the clinical symptoms of a disease, is sufficient to affect such treatment of the disease or symptom thereof. The “therapeutically effective amount” may vary depending, for example, on the disease and/or symptoms of the disease, severity of the disease and/or symptoms of the disease or disorder, the age, weight, and/or health of the patient to be treated, and the judgment of the prescribing physician. An appropriate amount in any given instance may be ascertained by those skilled in the art or capable of determination by routine experimentation.

[0054] As used herein, the terms “virus vector,” “vector” or “gene delivery vector” refer to a virus (e.g., AAV) particle that functions as a nucleic acid delivery vehicle, and which comprises the vector genome (e.g., viral DNA [vDNA]) packaged within a virion. Alternatively, in some contexts, the term “vector” may be used to refer to the vector genome/vDNA alone.

[0055] A “rAAV vector genome” or “rAAV genome” is an AAV genome (i.e., vDNA) that comprises one or more heterologous nucleic acid sequences. rAAV vectors generally require only the terminal repeat(s) (TR(s)) in cis to generate virus. All other viral sequences are dispensable and may be supplied in trans (Muzyczka, (1992) Curr. Topics Microbiol. Immunol. 158:97). Typically, the rAAV vector genome will only retain the one or more TR sequence so as to maximize the size of the transgene that can be efficiently packaged by the vector. The structural and non-structural protein coding sequences may be provided in trans (e.g., from a vector, such as a plasmid, or by stably integrating the sequences into a packaging cell). In embodiments, the rAAV vector genome comprises at least one TR sequence (e.g., AAV TR sequence), optionally two TRs (e.g., two AAV TRs), which typically will be at the 5′ and 3′ ends of the vector genome and flank the heterologous nucleic acid, but need not be contiguous thereto. The TRs can be the same or different from each other.

[0056] The term “terminal repeat” or “TR” includes any viral terminal repeat or synthetic sequence that forms a hairpin structure and functions as an inverted terminal repeat (i.e., mediates the desired functions such as replication, virus packaging, integration and/or provirus rescue, and the like). The TR can be an AAV TR or a non-AAV TR. For example, a non-AAV TR sequence such as those of other parvoviruses (e.g., canine parvovirus (CPV), mouse parvovirus (MVM), human parvovirus B-19) or any other suitable virus sequence (e.g., the SV40 hairpin that serves as the origin of SV40 replication) can be used as a TR, which can further be modified by truncation, substitution, deletion, insertion and/or addition. Further, the TR can be partially or completely synthetic, such as the “double-D sequence” as described in U.S. Pat. No. 5,478,745 to Samulski et al.

[0057] An “AAV terminal repeat” or “AAV TR” may be from any AAV, including but not limited to serotypes 1, 2, 3, 4, 5, 6, 7, 8, 9, 10, 11, 12, 13 or any other AAV now known or later discovered (see, e.g., Table 2). An AAV terminal repeat need not have the native terminal repeat sequence (e.g., a native AAV TR sequence may be altered by insertion, deletion, truncation and/or missense mutations), as long as the terminal repeat mediates the desired functions, e.g., replication, virus packaging, integration, and/or provirus rescue, and the like.

[0058] The virus vectors of the disclosure can further be “targeted” virus vectors (e.g., having a directed tropism) and/or a “hybrid” parvovirus (i.e., in which the viral TRs and viral capsid are from different parvoviruses) as described in international patent publication WO00/28004 and Chao et al, (2000) Molecular Therapy 2:619.

[0059] The virus vectors of the disclosure can further be duplexed parvovirus particles as described in international patent publication WO 01/92551 (the disclosure of which is incorporated herein by reference in its entirety). Thus, in some embodiments, double stranded (duplex) genomes can be packaged into the virus capsids of the disclosure. Further, the viral capsid or genomic elements can contain other modifications, including insertions, deletions and/or substitutions.

[0060] As used herein, the term “amino acid” encompasses any naturally occurring amino acid, modified forms thereof, and synthetic amino acids.

[0061] Naturally occurring, levorotatory (L-) amino acids are shown in Table 3.

TABLE 3
Amino acid residues and abbreviations.

| | Abbreviation | |
|---|---|---|
| Amino Acid Residue | Three-Letter Code | One-Letter Code |
| Alanine | Ala | A |
| Arginine | Arg | R |
| Asparagine | Asn | N |
| Aspartic acid (Aspartate) | Asp | D |
| Cysteine | Cys | C |
| Glutamine | Gln | Q |
| Glutamic acid (Glutamate) | Glu | E |
| Glycine | Gly | G |
| Histidine | His | H |
| Isoleucine | Ile | I |
| Leucine | Leu | L |
| Lysine | Lys | K |
| Methionine | Met | M |
| Phenylalanine | Phe | F |
| Proline | Pro | P |
| Serine | Ser | S |
| Threonine | Thr | T |
| Tryptophan | Trp | W |
| Tyrosine | Tyr | Y |
| Valine | Val | V |

[0062] Alternatively, the amino acid can be a modified amino acid residue (nonlimiting examples are shown in Table 4) and/or can be an amino acid that is modified by post-translation modification (e.g., acetylation, amidation, formylation, hydroxylation, methylation, phosphorylation or sulfatation).

TABLE 4
Modified Amino Acid Residues

| Modified Amino Acid Residue | Abbreviation |
|---|---|
| Amino Acid Residue Derivatives | |
| 2-Aminoadipic acid | Aad |
| 3-Aminoadipic acid | bAad |
| beta-Alanine, beta-Aminoproprionic acid | bAla |
| 2-Aminobutyric acid | Abu |
| 4-Aminobutyric acid, Piperidinic acid | 4Abu |
| 6-Aminocaproic acid | Acp |
| 2-Aminoheptanoic acid | Ahe |
| 2-Aminoisobutyric acid | Aib |
| 3-Aminoisobutyric acid | bAib |
| 2-Aminopimelic acid | Apm |
| t-butylalanine | t-BuA |
| Citrulline | Cit |
| Cyclohexylalanine | Cha |
| 2,4-Diaminobutyric acid | Dbu |
| Desmosine | Des |
| 2,21-Diaminopimelic acid | Dpm |
| 2,3-Diaminoproprionic acid | Dpr |
| N-Ethylglycine | EtGly |
| N-Ethylasparagine | EtAsn |
| Homoarginine | hArg |
| Homocysteine | hCys |
| Homoserine | hSer |
| Hydroxylysine | Hyl |
| Allo-Hydroxylysine | aHyl |
| 3-Hydroxyproline | 3Hyp |
| 4-Hydroxyproline | 4Hyp |
| Isodesmosine | Ide |
| allo-Isoleucine | alle |
| Methionine sulfoxide | MSO |
| N-Methylglycine, sarcosine | MeGly |
| N-Methyl isoleucine | Melle |
| 6-N-Methyllysine | MeLys |
| N-Methylvaline | MeVal |
| 2-Naphthylalanine | 2-Nal |
| Norvaline | Nva |
| Norleucine | Nle |
| Ornithine | Orn |
| 4-Chlorophenylalanine | Phe(4-C1) |
| 2-Fluorophenylalanine | Phe(2-F) |
| 3-Fluorophenylalanine | Phe(3-F) |
| 4-Fluorophenylalanine | Phe(4-F) |
| Phenylglycine | Phg |
| Beta-2-thienylalanine | Thi |

[0063] Further, the non-naturally occurring amino acid can be an “unnatural” amino acid (as described by Wang et al., Annu Rev Biophys Biomol Struct. 35:225-49 (2006)). These unnatural amino acids can advantageously be used to chemically link molecules of interest to the AAV capsid protein.

### Modified AAV Capsid Proteins and Virus Capsids and Virus Vectors Comprising the Same.

[0064] The present disclosure provides AAV capsid proteins (VP1, VP2 and/or VP3) comprising a modification (e.g., a substitution) in the amino acid sequence and virus capsids and virus vectors comprising the modified AAV capsid protein. The inventors have discovered that the modifications described herein can confer one or more desirable properties to virus vectors comprising the modified AAV capsid protein including without limitation, the ability to evade neutralizing antibodies. Thus, the present disclosure addresses some of the limitations associated with conventional AAV vectors.

[0065] Accordingly, in one aspect, the present disclosure provides an adeno-associated virus (AAV) capsid protein, comprising one or more amino acid substitutions, wherein the one or more substitutions modify one or more antigenic sites on the AAV capsid protein. The modification of the one or more antigenic sites results in inhibition of binding by an antibody to the one or more antigenic sites and/or inhibition of neutralization of infectivity of a virus particle comprising said AAV capsid protein. The one or more amino acid substitutions can be in one or more antigenic footprints identified by peptide epitope mapping and/or cryo-electron microscopy studies of AAV-antibody complexes containing AAV capsid proteins. In some embodiments, the one or more antigenic sites are common antigenic motifs or CAMs as described in WO 2017/058892, which is incorporated herein by reference in its entirety. In some embodiments, the antigenic sites are in a variable region (VR) of the AAV capsid protein, such as VR-I, VR-II, VR-III, VR-IV, VR-V, VR-VI, VR-VII, VR-VIII, VR-IX. In some embodiments, one or more antigenic sites is in the HI loop of the AAV capsid protein.

[0066] In some embodiments, the modified antigenic site can prevent antibodies from binding or recognizing or neutralizing AAV capsids, wherein the antibody is an IgG (including IgG1, IgG2a, IgG2b, IgG3), IgM, IgE or IgA.

[0067] In some embodiments, an AAV1, AAV2, AAV3, AAV4, AAV5, AAV6, AAV7, AAV8, AAV9, AAVrh8, AAVrh10, AAV10, AAV11, AAV12, AAVrh32.22, bovine AAV, or Avian AAV capsid protein comprises an amino acid substitution in one or more of the regions identified in Table 5, below. In some embodiments, the amino acid substitution is selected from the group consisting of SEQ ID NO: 9, 10, 11, 12, 13, 14, 15, 16, 17, 297, 298, 299, and 411-421. In some embodiments, the amino acid substitution has at least 95%, 95%, 96%, 97%, 98%, or 99% sequence homology with SEQ ID NO: 9, 10, 11, 12, 13, 14, 15, 16, 17, 297, 298, 299, or 411-421.

TABLE 5
Exemplary antigenic or other regions on various AAV capsids that may be
partially or fully substituted/replaced. Respective VP1 numbering of residues
is shown.

| AAV1 | | AAV2 | | AAV3 | | AAV4 | | AAV5 | |
|---|---|---|---|---|---|---|---|---|---|
| Sequence | | Sequence | | Sequence | | Sequence | | Sequence | |
| (amino | SEQ | (amino | SEQ | (amino | SEQ | (amino | SEQ | (amino | SEQ |
| acid | ID | acid | ID | acid | ID | acid | ID | acid | ID |
| numbers) | NO | numbers) | NO | numbers) | NO | numbers) | NO | numbers) | NO |
| SASTGAS | 613 | SQSGAS | 623 | SQSGAS | 633 | RLGESLQ | 643 | EIKSGSVD | 653 |
| (262-268) | | (262-267) | | (262-267) | | S | | GS | |
| | | | | | | (253-260) | | (249-258) | |
| VFMIPQY | 614 | VFMVPQY | 624 | VFMVPQY | 634 | VFMVPQY | 644 | VFTLPQY | 654 |
| GYL | | GYL | | | GYL | | GYC | | GYA |
| (370-379) | | (369-378) | | (369-378) | | (360-369) | | (360-369) | |
| NQSGSA | 615 | TPSGTTT | 625 | TTSGTTN | 635 | GTTLNAG | 645 | STNNTGG | 655 |
| QNK | | QS | | QS | | TA | | VQ | |
| (451-459) | | (450-458) | | (451-459) | | (445-453) | | (440-448) | |
| SV | 616 | RD | 626 | SL | 636 | SN | 646 | AN | 656 |
| (472-473) | | (471-472) | | (472-473) | | (466-467) | | (458-459) | |
| KTDNNN | 617 | SADNNNS | 627 | ANDNNNS | 637 | ANQNYKI | 647 | SGVNRAS | 657 |
| SN | | E | | N | | PATGS | | (479-485) | |
| (493-500) | | (492-499) | | (493-500) | | (487-498) | | | |
| KDDEDK | 618 | KDDEEKF | 628 | KDDEEKF | 638 | GPADSKF | 648 | LQGSNTY | 658 |
| F | | (527-533) | | (528-534) | | (527-533) | | (515-521) | |
| (528-534) | | | | | | | | | |
| SAGASN | 619 | GSEKTN | 629 | GTTASN | 639 | QNGNTA | 649 | ANPGTTA | 659 |
| (547-552) | | (546-551) | | (547-552) | | (545-560) | | T | |
| | | | | | | | | (534-541) | |
| STDPATG | 620 | NRQAATA | 630 | NTAPTTGT | 640 | SNLPTVD | 650 | TTAPATG | 660 |
| DVH | | DVN | | VN | | RLT | | TYN | |
| (588-597) | | (587-596) | | (588-597) | | (583-595) | | (577-586) | |
| AN | 621 | VN | 631 | VN | 641 | NS | 651 | QF | 661 |
| (709-710) | | (708-709) | | (709-710) | | (707-708) | | (697-698) | |
| DNNGLY | 622 | DTNGVYS | 632 | DTNGVYS | 642 | DAAGKYT | 652 | DSTGEYR | 662 |
| T | | (715-721) | | (716-722) | | (714-720) | | (704-710) | |
| (716-722) | | | | | | | | | |
| AAV6 | | AAV7 | | AAV8 | | AAV9 | | AAVrh8 | |
| (amino | SEQ | (amino | SEQ | (amino | SEQ | (amino | SEQ | (amino | SEQ |
| acid | ID | acid | ID | acid | ID | acid | ID | acid | ID |
| numbers) | NO | numbers) | NO | numbers) | NO | numbers) | NO | numbers) | NO |
| SASTGAS | 663 | SETAGST | 673 | NGTSGG | 683 | NSTSGG | 693 | NGTSGGS | 703 |
| (262-268) | | (263-269) | | AT | | SS | | T | |
| | | | | (263-270) | | (262-269) | | (262-269) | |
| VFMIPQY | 664 | VFMIPQY | 674 | VFMIPQY | 684 | VFMIPQY | 694 | VFMVPQY | 704 |
| GYL | | GYL | | GYL | | GYL | | GYL | |
| (370-379) | | (371-380) | | (372-381) | | (371-380) | | (371-380) | |
| NQSGSA | 665 | NPGGTA | 675 | TTGGTA | 685 | INGSGQ | 695 | QTTGTGG | 705 |
| QNK | | GNR | | NTQ | | NQQ | | TQ | |
| (451-459) | | (453-461) | | (453-461) | | (451-459) | | (451-459) | |
| SV | 666 | AN | 676 | AN | 686 | AV | 696 | AN | 706 |
| (472-473) | | (474-475) | | (474-475) | | (472-473) | | (472-473) | |
| KTDNNN | 667 | LDQNNNS | 677 | TGQNNN | 687 | VTQNNN | 697 | TNQNNNS | 707 |
| SN | | N | | SN | | SE | | N | |
| (493-500) | | (495-502) | | (495-502) | | (493-500) | | (493-500) | |
| KDDKDK | 668 | KDDEDRF | 678 | KDDEER | 688 | KEGEDR | 698 | KDDDDRF | 708 |
| F | | (530-536) | | F | | F | | (528-534) | |
| (528-534) | | | | (530-536) | | (528-534) | | | |
| SAGASN | 669 | GATNKT | 679 | NAARDN | 689 | GTGRDN | 699 | GAGNDG | 709 |
| (547-552) | | (549-554) | | (549-554) | | (547-552) | | (547-552) | |
| STDPATG | 670 | NTAAQTQ | 680 | NTAPQIG | 690 | QAQAQT | 700 | NTQAQTG | 710 |
| DVH | | VVN | | TVNS | | GWVQ | | LVH | |
| (588-897) | | (589-598) | | (590-600) | | (588-597) | | (588-597) | |
| AN | 671 | TG | 681 | TS | 691 | NN | 701 | TN | 711 |
| (709-710) | | (710-711) | | (711-712) | | (709-710) | | (709-710) | |
| DNNGLY | 672 | DSQGVY | 682 | NTEGVY | 692 | NTEGVY | 702 | NTEGVYS | 712 |
| T | | S | | S | | S | | (716-722) | |
| (716-722) | | (717-723) | | (718-724) | | (716-722) | | | |
| AAVrh10 | | AAV10 | | AAV11 | | AAV12 | | AAVrh32.33 | |
| (amino | SEQ | (amino | SEQ | (amino | SEQ | (amino | SEQ | (amino | SEQ |
| acid | ID | acid | ID | acid | ID | acid | ID | acid | ID |
| numbers) | NO | numbers) | NO | numbers) | NO | numbers) | NO | numbers) | NO |
| NGTSGGS | 713 | NGTSGG | 723 | RLGTTSS | 733 | RIGTTAN | 743 | RLGTTSNS | 753 |
| T | | ST | | S | | S | | (253-260) | |
| (263-270) | | (263-270) | | (253-260) | | (262-269) | | | |
| VFMIPQY | 714 | VFMIPQY | 724 | VFMVPQ | 734 | VFMVPQ | 744 | VFMVPQYG | 754 |
| GYL | | GYL | | YGYC | | YGYC | | YC | |
| (372-381) | | (372-381) | | (360-369) | | 369-378) | | (360-369) | |
| STGGTAG | 715 | STGGTQ | 725 | GETLNQ | 735 | GNSLNQ | 745 | GETLNQGN | 755 |
| TQ | | GTQ | | GNA | | GTA | | A | |
| (453-461) | | (453-461) | | (444-452) | | (453-461) | | (444-452) | |
| SA | 716 | SA | 726 | AF | 736 | AY | 746 | AF | 756 |
| (474-475) | | (474-475) | | (465-466) | | (474-475) | | (465-466) | |
| LSQNNNS | 717 | LSQNNNS | 727 | ASQNYKI | 737 | ANQNYKI | 747 | ASQNYKIPA | 757 |
| N | | N | | PASGG | | PASGG | | SGG | |
| (495-502) | | (495-502) | | (486-497) | | (495-506) | | (486-497) | |
| KDDEERF | 718 | KDDEERF | 728 | GPSDGD | 738 | GAGDSD | 748 | GPSDGDF | 758 |
| (530-536) | | (530-536) | | F | | F | | (526-532) | |
| | | | | (526-532) | | (535-541) | | | |
| GAGKDN | 719 | GAGRDN | 729 | VTGNTT | 739 | PSGNTT | 749 | VTGNTT | 759 |
| (549-554) | | (549-554) | | (544-549) | | (553-558) | | (544-549) | |
| NAAPIVG | 720 | NTGPIVG | 730 | TTAPITG | 740 | TTAPHIA | 750 | TTAPITGNV | 760 |
| AVN | | NVN | | NVT | | NLD | | T | |
| (590-599) | | (590-599) | | (585-594) | | (594-503) | | (585-594) | |
| TN | 721 | TN | 731 | SS | 741 | NS | 751 | SS | 761 |
| (711-712) | | (711-712) | | (706-707) | | (715-716) | | (706-707) | |
| NTDGTYS | 722 | NTEGTYS | 732 | DTTGKYT | 742 | DNAGNY | 752 | DTTGKYT | |
| (718-724) | | (718-724) | | (713-719) | | H | | (713-719) | 762 |
| | | | | | | (722-728) | | | |
| Bovine | | Avian | | | | | | | |
| AAV | | AAV | | | | | | | |
| (amino | SEQ | (amino | SEQ | | | | | | |
| acid | ID | acid | ID | | | | | | |
| numbers) | NO | numbers) | NO | | | | | | |
| RLGSSN | 763 | RIQGPSG | 773 | | | | | | |
| AS | | G | | | | | | | |
| (255-262) | | (265-272) | | | | | | | |
| VFMVPQ | 764 | IYTIPQYG | 774 | | | | | | |
| YGYC | | YC | | | | | | | |
| (362-371) | | (375-384) | | | | | | | |
| GGTLNQ | 765 | VSQAGS | 775 | | | | | | |
| GNS | | SGR | | | | | | | |
| (447-455) | | (454-462) | | | | | | | |
| SG | 766 | AA | 776 | | | | | | |
| (468-469) | | (475-476) | | | | | | | |
| ASQNYKI | 767 | ASNITKN | 777 | | | | | | |
| PQGRN | | NVFSV | | | | | | | |
| (489-500) | | (496-507) | | | | | | | |
| ANDATDF | 768 | FSGEPDR | 778 | | | | | | |
| (529-535) | | (533-539) | | | | | | | |
| ITGNTT | 769 | VYDQTTA | 779 | | | | | | |
| (547-552) | | T | | | | | | | |
| | | (552-559) | | | | | | | |
| TTVPTVD | 770 | VTPGTRA | 780 | | | | | | |
| DVD | | AVN | | | | | | | |
| (588-597) | | (595-604) | | | | | | | |
| DS | 771 | AD | 781 | | | | | | |
| (709-710) | | (716-717) | | | | | | | |
| DNAGAY | 772 | SDTGSYS | 782 | | | | | | |
| K | | (723-729) | | | | | | | |
| (716-722) | | | | | | | | | |

[0068] In some embodiments, the amino acid substitution replaces any six, seven, or eight amino acids in an AAV capsid protein from any one of the following serotypes: AAV1, AAV2, AAV3, AAV4, AAV5, AAV6, AAV7, AAV8, AAV9, AAVrh8, AAVrh10, AAV10, AAV11, AAV12, AAVrh32.22, bovine AAV, or Avian AAV. For example, the amino acid substitution may replace the following amino acids (VP1 numbering) in any of the above-listed AAV serotypes: 280-286, 279-293, 294-300, 301-307, 308-314, 315-321, 322-328, 329-335, 336-342, 343-349, 350-356, 357-363, 364-370, 371-377, 378-384, 385-391, 392-398, 399-405, 406-412, 143-149, 420-426, 427-433, 434-440, 441-447, 448-454, 455-461, 462-468, 469-475, 476-482, 483-489, 490-496, 497-503, 504-510, 511-517, 518-524, 525-531, 532-538, 539-545, 546-552, 553-559, 560-566, 567-573, 574-580, 581-587, 588-594, 595-601, 602-608, 609-615, 616-622, 623-629, 630-636, 637-643, 644-650, 651-657, 658-664, 665-671, 672-678, 679-685, 686-692, 693-699. In embodiments, the amino acid substitution may replace the following amino acids (VP1 numbering) in any of the above-listed AAV serotypes: 294-301, 302-309, 310-317, 318-325, 326-333, 334-331, 342-349, 350-357, 358-365, 366-373, 374-381, 382-389, 390-397, 398-405, 406-413, 414-421, 422-429, 430-437, 438-445, 446-453, 454-461, 462-469, 470-477, 478-485, 486-493, 494-501, 502-509, 210-517, 518-525, 526-533, 534-541, 542-549, 550-557, 558-565, 566-573, 574-581, 582-589, 590-597, 598-605, 506-613, 614-621, 622-629, 630-637, 638-645, 646-653, 654-661, 662-669, 670-677, 678-685, 686-693, 694-701. In embodiments, the amino acid substitution may replace the following amino acids (VP1 numbering) in any of the above-listed AAV serotypes: 400-405, 406-411, 412-417, 418-423, 424-429, 430-435, 436-441, 442-447, 448-453, 454-459, 460-465, 466-471, 472-477, 478-483, 484-489, 490-495, 484-489, 490-495, 496-501, 502-507, 508-513, 514-519, 520-525, 526-531, 532-537, 538-543, 544-549, 550-555, 556-561, 562-567, 568-573, 574-579, 580-585, 586-591, 592-597, 598-603, 604-609, 610-615, 616-621, 622-627, 628-633, 634-639, 640-645, 646-651, 652-657, 658-663, 664-669, 670-675, 676-681, 682-687, 688-693, 694-699, 700-705.

[0069] In some embodiments, the substitution introduces a deletion into the AAV capsid sequence. For example, a sequence of 6, 7, 8, or 9 amino acids are substituted to replace 7, 8, 9, or 10 amino acids, respectively, of a native amino acid capsid sequence. In some embodiments, the substitution introduces an insertion into the AAV capsid sequence. For example, a sequence of 6, 7, 8, or 9 amino acids are substituted to replace 5, 6, 7, or 8 amino acids, respectively, of a native amino acid capsid sequence.

[0070] The capsid proteins of this disclosure are modified to produce an AAV capsid that is present in an AAV virus particle or AAV virus vector that has a phenotype of evading neutralizing antibodies. The AAV virus particle or vector of this disclosure can also have a phenotype of enhanced or maintained transduction efficiency in addition to the phenotype of evading neutralizing antibodies.

[0071] In some embodiments, the one or more substitutions of the one or more antigenic sites can introduce one or more antigenic sites from a capsid protein of a first AAV serotype into the capsid protein of a second AAV serotype that is different from said first AAV serotype.

[0072] The AAV capsid protein of this disclosure can be a capsid protein of an AAV serotype selected from AAV1, AAV2, AAV3, AAV3B, AAV4, AAV5, AAV6, AAV7, AAV8, AAV9, AAV10, AAV11, AAV12, AAVrh.8, AAVrh.10, AAVrh.32.33, AAVrh74, bovine AAV, avian AAV or any other AAV now known or later identified. In some embodiments, the AAV capsid protein is chimeric.

[0073] Several examples of a modified AAV capsid protein of this disclosure are provided herein. In the following examples, the capsid protein can comprise the specific substitutions described and in some embodiments can comprise fewer or more substitutions than those described. As used herein, “substitution” may refer to a single amino acid substitution, or a substitution of more than one amino acid. For example in some embodiments, a capsid protein of this disclosure can comprise at least 1, 2, 3, 4, 5, 6, 7, 8, 9, 10, etc., single amino acid substitutions. In some embodiments, a capsid protein of this disclosure can comprise one or more substitutions of multiple contiguous amino acids, such as one or more substitutions of 2, 3, 4, 5, 6, 7, 8, 9, 10, 11, or 12 contiguous amino acids.

[0074] Furthermore, in the embodiments described herein wherein an amino acid residue is substituted by any amino acid residue other than the amino acid residue present in the wild type or native amino acid sequence, said any other amino acid residue can be any natural or non-natural amino acid residue known in the art (see, e.g., Tables 3 and 4). In some embodiments, the substitution can be a conservative substitution and in some embodiments, the substitution can be a nonconservative substitution.

[0075] In some embodiments, an AAV capsid protein comprises one or more amino acid substitutions, wherein the amino acid substitutions are selected from the sequences listed in Table 6.1.

TABLE 6.1
AMINO ACID SUBSTITUTIONS

| Sequence | |
|---|---|
| Substitution | SEQ ID NO. |
| SNGRGV | 9 |
| NLAENFKY | 10 |
| VLSGDHSA | 11 |
| MSAASGSG | 12 |
| GTNLGKEQ | 13 |
| SSHSGTNQ | 14 |
| VATRDGQL | 15 |
| ALNADTGT | 16 |
| VMEPTR | 17 |
| VVGNGGVV | 297 |
| NFREMPIG | 298 |
| RRSEDMGTI | 299 |
| YPLQNNNS | 411 |
| YPLENFKY | 412 |
| YPLGDHSA | 413 |
| YPLASGSG | 414 |
| YPLLGKEQ | 415 |
| YPLSGTNQ | 416 |
| YPLRDGQL | 417 |
| YPLADTGT | 418 |
| YPLNGGVV | 419 |
| YPLEMPIG | 420 |
| YPLEDMGTI | 421 |

[0076] In some embodiments, the AAV capsid protein comprises a first amino acid substitution and a second amino acid substitution, wherein the first amino acid substitution and the second amino acid substitution each modify a different antigenic site on the AAV capsid protein. In some embodiments, the first amino acid substitution and the second amino acid substitution are each selected from SEQ ID NO: 9, 10, 11, 12, 13, 14, 15, 16, 17, 297, 298, 299, and 411-421.

[0077] In some embodiments, the AAV capsid protein comprises a first acid substitution, a second amino acid substitution, and a third amino acid substitution, wherein the first amino acid substitution, the second amino acid substitution, and the third amino acid substitution each modify a different antigenic site on the AAV capsid protein. In some embodiments, the first amino acid substitution, the second amino acid substitution and the third amino acid substitution are each selected from SEQ ID NO: 9, 10, 11, 12, 13, 14, 15, 16, 17, 297, 298, 299, and 411-421. In some embodiments, the first amino acid substitution comprises SEQ ID NO. 9; the second amino acid substitution comprises one of SEQ ID NO. 10, 11, 12, 13, 14, 15, 16, 297, 298, 299 or 411-421; and the third amino acid substitution comprises SEQ ID NO. 17. In some embodiments, the first amino acid substitution comprises SEQ ID NO. 9; the second amino acid substitution comprises one of SEQ ID NO. 10; and the third amino acid substitution comprises SEQ ID NO. 17. In some embodiments, the first amino acid substitution comprises SEQ ID NO. 9; the second amino acid substitution comprises one of SEQ ID NO. 14; and the third amino acid substitution comprises SEQ ID NO. 17.

[0078] In some embodiments, the AAV capsid protein comprises the sequence of any one of SEQ ID NOs: 18-80, 300-410, 422-612, or 783-785. In some embodiments, the AAV capsid protein comprises the sequence of any one of SEQ ID NO: 18-80, 300-410, 422-612, or 783-785. In some embodiments, the AAV capsid protein has at least 95%, 95%, 96%, 97%, 98%, or 99% sequence homology with any one of SEQ ID NOs: 18-80, 300-410, 422-612, or 783-785.

[0079] In some embodiments, the AAV capsid protein comprises SEQ ID NO: 49. In some embodiments, the AAV capsid protein has at least 95%, 95%, 96%, 97%, 98%, or 99% sequence homology with SEQ ID NO: 49. In some embodiments, the AAV capsid protein is modified by replacing the region spanning amino acids 454-460 of SEQ ID NO: 49 with SEQ ID NO: 9. In some embodiments, the AAV capsid protein is modified by replacing the region spanning amino acids 493-500 of SEQ ID NO: 49 with one of SEQ ID NO: 10, 11, 12, 13, 14, 15, 16, 297, 298, 299, or 411-421. In some embodiments, the AAV capsid protein is modified by replacing the region spanning amino acids 585-590 of SEQ ID NO: 49 with SEQ ID NO: 17. In some embodiments, the AAV capsid protein is modified by replacing the region spanning amino acids 454-460 of SEQ ID NO: 49 with SEQ ID NO: 9, the region spanning amino acids 493-500 of SEQ ID NO: 49 with one of SEQ ID NO: 10, 11, 12, 13, 14, 15, 16, 297, 298, 299, or 411-421, and the region spanning amino acids 585-590 of SEQ ID NO: 49 with SEQ ID NO: 17.

[0080] Any of the AAV capsids described herein may further comprise a modification (e.g., a substitution or a deletion) in the HI loop. The HI loop is a prominent domain on the AAV capsid surface, between β strands βH and β, that extends from each viral protein (VP) subunit overlapping the neighboring fivefold VP. In some embodiments, an AAV capsid comprises one, two, three, four, five, six, seven, or eight amino acid substitutions in the HI loop. In some embodiments, the AAV capsid comprises one or more of the following substitutions in the HI loop: P661R, T662S, Q666G, S667D, wherein the numbering corresponds to the wildtype AAV8 capsid (SEQ ID NO: 6). In some embodiments, the AAV capsid comprises one or more of the following substitutions in the HI loop: P659R, T660S, A661T, K664G, wherein the numbering corresponds to the wildtype AAV9 capsid (SEQ ID NO: 7).

[0081] In some embodiments, an AAV capsid protein comprises one, two, three, or four amino acid substitutions, wherein each substitution modifies a different antigenic site on the AAV capsid protein, and wherein at least one of the amino acid substitutions modifies the HI loop of the capsid protein.

[0082] In some embodiments, an AAV capsid protein comprises a first, a second, a third, and a fourth amino acid substitution. In embodiments, the first amino acid substitution, the second amino acid substitution and the third amino acid substitution are each selected from SEQ ID NO: 9, 10, 11, 12, 13, 14, 15, 16, 17, 297, 298, 299, and 411-421, and the fourth amino acid substitution modifies the HI loop of the capsid protein. In some embodiments, the first amino acid substitution comprises SEQ ID NO. 9; the second amino acid substitution comprises one of SEQ ID NO. 10, 11, 12, 13, 14, 15, 16, 297, 298, 299, or 411-421; the third amino acid substitution comprises SEQ ID NO. 17, and the fourth amino acid substitution modifies the HI loop of the capsid protein. In some embodiments, the AAV capsid comprises one or more of the following substitutions in the HI loop: P661R, T662S, Q666G, S667D, wherein the numbering corresponds to the wildtype AAV8 capsid (SEQ ID NO: 6); or P659R, T660S, A661T, K664G, wherein the numbering corresponds to the wildtype AAV9 capsid (SEQ ID NO: 7).

[0083] In some embodiments, an AAV capsid protein may comprise a first substitution, a second substitution, and optionally a third substitution, as shown in Table 6.2.

TABLE 6.2
COMBINATIONS OF AMINO ACID SUBSTITUTIONS

| First Substitution | Second Substitution | Third Substitution |
|---|---|---|
| (SEQ ID NO) | (SEQ ID NO) | (SEQ ID NO) |
| 9 | 10 | 17 |
| 9 | 11 | 17 |
| 9 | 12 | 17 |
| 9 | 13 | 17 |
| 9 | 14 | 17 |
| 9 | 15 | 17 |
| 9 | 16 | 17 |
| 9 | 297 | 17 |
| 9 | 298 | 17 |
| 9 | 299 | 17 |
| 9 | 411 | 17 |
| 9 | 412 | 17 |
| 9 | 413 | 17 |
| 9 | 414 | 17 |
| 9 | 415 | 17 |
| 9 | 416 | 17 |
| 9 | 417 | 17 |
| 9 | 418 | 17 |
| 9 | 419 | 17 |
| 9 | 420 | 17 |
| 9 | 421 | 17 |
| 9 | 10 | |
| 9 | 11 | |
| 9 | 12 | |
| 9 | 13 | |
| 9 | 14 | |
| 9 | 15 | |
| 9 | 16 | |
| 9 | 297 | |
| 9 | 298 | |
| 9 | 299 | |
| 9 | 411 | |
| 9 | 412 | |
| 9 | 413 | |
| 9 | 414 | |
| 9 | 415 | |
| 9 | 416 | |
| 9 | 417 | |
| 9 | 418 | |
| 9 | 419 | |
| 9 | 420 | |
| 9 | 421 | |
| 9 | 17 | |
| 10 | 17 | |
| 11 | 17 | |
| 12 | 17 | |
| 13 | 17 | |
| 14 | 17 | |
| 15 | 17 | |
| 16 | 17 | |
| 297 | 17 | |
| 298 | 17 | |
| 299 | 17 | |
| 411 | 17 | |
| 412 | 17 | |
| 413 | 17 | |
| 414 | 17 | |
| 415 | 17 | |
| 416 | 17 | |
| 417 | 17 | |
| 418 | 17 | |
| 419 | 17 | |
| 420 | 17 | |
| 421 | 17 | |

[0084] In some embodiments, a recombinant capsid protein has a sequence that is at least 90%, at least 95%, at least 96%, at least 97%, at least 98%, at least 99% or 100% identical to SEQ ID NO: 6 (AAV8) or SEQ ID NO: 7 (AAV9) and comprises a first substitution, a second substitution, and optionally a third substitution, as shown in Table 6.2.

[0085] In some embodiments, a recombinant capsid protein has a sequence that is at least 90%, at least 95%, at least 96%, at least 97%, at least 98%, at least 99% or 100% identical to SEQ ID NO: 6 (AAV8) and comprises one or more of the following amino acid substitutions: G455S, G456N, G456S, T457G, T457N, A458R, A458G, N459G, N459R, T460V, T460G, N459R, Q461V, T494N, T494V, T494M, T494G, T494S, T494A, T494R, T494Y, T495L, T495S, T495T, T495S, T495V, T495F, T495R, T495P, G496A, G496S, G496N, G496H, G496T, G496N, G496R, G496L, Q497E, Q497G, Q497A, Q497L, Q497S, Q497R, Q497A, Q497N, Q497E, Q497E, N498D, N498S, N498G, N498M, N499F, N499H, N499G, N499K, N499T, N499P, N499M, N500K, N500S, N500E, N500N, N500Q, N500G, N500V, N500I, N500T, S501Y, S501A, S501G, S501Q, S501L, S501T, S501V, S501G, S501I, L586V, Q587M, Q588E, Q589P, N590T, T591R. In some embodiments, a recombinant capsid protein has a sequence that is at least 90%, at least 95%, at least 96%, at least 97%, at least 98%, at least 99% or 100% identical to SEQ ID NO: 6 (AAV8) and comprises the following amino acid substitutions: T494Y, T495P, and/or G496L.

[0086] In some embodiments, a recombinant capsid protein has a sequence that is at least 90%, at least 95%, at least 96%, at least 97%, at least 98%, at least 99% or 100% identical to the sequences of SEQ ID NO: 380, 384, 783, 784, or 785.

[0087] The present disclosure also provides a nucleotide sequence, or an expression vector comprising the same, that encodes one or more of the AAV capsid proteins of the disclosure. The nucleotide sequence may be a DNA sequence or an RNA sequence. The present disclosure also provides a cell that comprises one or more nucleotide sequences or expression vectors of the disclosure.

[0088] Also provided is an AAV capsid comprising an AAV capsid protein of this disclosure. Further provided herein is a viral vector comprising an AAV capsid of this disclosure as well as a composition comprising the AAV capsid protein, AAV capsid and/or viral vector of this disclosure in a pharmaceutically acceptable carrier.

[0089] In some embodiments, modification of the one or more antigenic sites results in inhibition of binding by an antibody to the one or more antigenic sites. In some embodiments, modification of the one or more antigenic sites results in inhibition of neutralization of infectivity of a virus particle comprising the AAV capsid protein.

[0090] As described herein, the nucleic acid and amino acid sequences of the capsid proteins from a number of AAV are known in the art. Thus, the amino acids “corresponding” to amino acid positions of the native AAV capsid protein can be readily determined for any other AAV (e.g., by using sequence alignments).

[0091] The disclosure contemplates that the modified capsid proteins can be produced by modifying the capsid protein of any AAV now known or later discovered.

[0092] Further, the AAV capsid protein that is to be modified can be a naturally occurring AAV capsid protein (e.g., an AAV2, AAV3a or 3b, AAV4, AAV5, AAV6, AAV7, AAV8, AAV9, AAV10 or AAV11 capsid protein or any of the AAV shown in Table 2) but is not so limited. Those skilled in the art will understand that a variety of manipulations to the AAV capsid proteins are known in the art and the disclosure is not limited to modifications of naturally occurring AAV capsid proteins. For example, the capsid protein to be modified may already have alterations as compared with naturally occurring AAV (e.g., is derived from a naturally occurring AAV capsid protein, e.g., AAV2, AAV3a, AAV3b, AAV4, AAV5, AAV6, AAV7, AAV8, AAV9, AAV10, AAV11, AAV12 or any other AAV now known or later discovered). In some embodiments, the capsid protein may be a chimeric capsid protein. In some embodiments, the capsid protein may be an engineered AAV, such as AAV2i8, AAV2g9, AAV-LK03, AAV7m8, AAV Anc80, AAV PHP.B. Such AAV capsid proteins are also within the scope of the present disclosure.

[0093] Thus, in particular embodiments, the AAV capsid protein to be modified can be derived from a naturally occurring AAV but further comprises one or more foreign sequences (e.g., that are exogenous to the native virus) that are inserted and/or substituted into the capsid protein and/or has been altered by deletion of one or more amino acids.

[0094] Accordingly, when referring herein to a specific AAV capsid protein (e.g., an AAV2, AAV3, AAV4, AAV5, AAV6, AAV7, AAV8, AAV9, AAV10 or AAV11 capsid protein or a capsid protein from any of the AAV shown in Table 2, etc.), it is intended to encompass the native capsid protein as well as capsid proteins that have alterations other than the modifications of the disclosure. Such alterations include substitutions, insertions and/or deletions. In particular embodiments, the capsid protein comprises 1, 2, 3, 4, 5, 6, 7, 8, 9, 10, 11, 12, 13, 14, 15, 16, 17, 18, 19 or 20, less than 20, less than 30, less than 40, less than 50, less than 60, or less than 70 amino acids inserted therein (other than the insertions of the present disclosure) as compared with the native AAV capsid protein sequence. In embodiments, the capsid protein comprises 1, 2, 3, 4, 5, 6, 7, 8, 9, 10, 11, 12, 13, 14, 15, 16, 17, 18, 19 or 20, less than 20, less than 30, less than 40, less than 50, less than 60, or less than 70 amino acid substitutions (other than the amino acid substitutions according to the present disclosure) as compared with the native AAV capsid protein sequence, in embodiments of the disclosure, the capsid protein comprises a deletion of 1, 2, 3, 4, 5, 6, 7, 8, 9, 10, 11, 12, 13, 14, 15, 16, 17, 18, 19 or 20, less than 20, less than 30, less than 40, less than 50, less than 60, or less than 70 amino acids (other than the amino acid deletions of the disclosure) as compared with the native AAV capsid protein sequence.

[0095] Methods of determining sequence similarity or identity between two or more amino acid sequences are known in the art. Sequence similarity or identity may be determined using standard techniques known in the art, including, but not limited to, the local sequence identity algorithm of Smith & Waterman, Adv. Appl. Math. 2, 482 (1981), by the sequence identity alignment algorithm of Needleman & Wunsch, J Mol. Biol. 48, 443 (1970), by the search for similarity method of Pearson & Lipman, Proc. Natl. Acad. Sci. USA 85, 2444 (1988), by computerized implementations of these algorithms (GAP, BESTFIT, FASTA, and TFASTA in the Wisconsin Genetics Software Package, Genetics Computer Group, 575 Science Drive, Madison, Wis.), the Best Fit sequence program described by Devereux et al., Nucl. Acid Res. 12, 387-395 (1984), or by inspection.

[0096] Another suitable algorithm is the BLAST algorithm, described in Altschul et al., J Mol. Biol. 215, 403-410, (1990) and Karlin et al., Proc. Natl. Acad. Sci. USA 90, 5873-5787 (1993). A particularly useful BLAST program is the WU-BLAST-2 program which was obtained from Altschul et al., Methods in Enzymology, 266, 460-480 (1996); http://blast.wustl/edu/blast/README.html. WU-BLAST-2 uses several search parameters, which are optionally set to the default values. The parameters are dynamic values and are established by the program itself depending upon the composition of the particular sequence and composition of the particular database against which the sequence of interest is being searched; however, the values may be adjusted to increase sensitivity.

[0097] Further, an additional useful algorithm is gapped BLAST as reported by Altschul et al, (1997) Nucleic Acids Res. 25, 3389-3402.

[0098] The disclosure also provides a virus capsid comprising, consisting essentially of, or consisting of the modified AAV capsid protein of the disclosure. In particular embodiments, the virus capsid is a parvovirus capsid, which may further be an autonomous parvovirus capsid or a dependovirus capsid. Optionally, the virus capsid is an AAV capsid. In particular embodiments, the AAV capsid is an AAV1, AAV2, AAV3a, AAV3b, AAV4, AAV5, AAV6, AAV7, AAV8, AAV9, AAV10, AAV11, AAV12, AAVrh8, AAVrh10, AAVrh32.33, bovine AAV capsid, avian AAV capsid or any other AAV now known or later identified. A nonlimiting list of AAV serotypes is shown in Table 2, and an AAV capsid of this disclosure can be any AAV serotype listed in Table 2 or derived from any of the foregoing by one or more insertions, substitutions and/or deletions. The modified virus capsids can be used as “capsid vehicles,” as has been described, for example, in U.S. Pat. No. 5,863,541. Molecules that can be packaged by the modified virus capsid and transferred into a cell include heterologous DNA, RNA, polypeptides, small organic molecules, metals, or combinations of the same.

[0099] Heterologous molecules are defined as those that are not naturally found in an AAV infection, e.g., those not encoded by a wild-type AAV genome. Further, therapeutically useful molecules can be associated with the outside of the chimeric virus capsid for transfer of the molecules into host target cells. Such associated molecules can include DNA, RNA, small organic molecules, metals, carbohydrates, lipids and/or polypeptides. In one embodiment of the disclosure the therapeutically useful molecule is covalently linked (i.e., conjugated or chemically coupled) to the capsid proteins. Methods of covalently linking molecules are known by those skilled in the art.

[0100] The modified virus capsids of the disclosure also find use in raising antibodies against the novel capsid structures. As a further alternative, an exogenous amino acid sequence may be inserted into the modified virus capsid for antigen presentation to a cell, e.g., for administration to a subject to produce an immune response to the exogenous amino acid sequence.

[0101] In other embodiments, the virus capsids can be administered to block certain cellular sites prior to and/or concurrently with (e.g., within minutes or hours of each other) administration of a virus vector delivering a nucleic acid encoding a polypeptide or functional RNA of interest. For example, the inventive capsids can be delivered to block cellular receptors on liver cells and a delivery vector can be administered subsequently or concurrently, which may reduce transduction of liver cells, and enhance transduction of other targets (e.g., skeletal, cardiac and/or diaphragm muscle).

[0102] According to representative embodiments, modified virus capsids can be administered to a subject prior to and/or concurrently with a modified virus vector according to the present disclosure. Further, the disclosure provides compositions and pharmaceutical formulations comprising the inventive modified virus capsids; optionally, the composition also comprises a modified virus vector of the disclosure.

[0103] The disclosure also provides nucleic acids (optionally, isolated nucleic acids) encoding the modified virus capsids and capsid proteins of the disclosure. Further provided are vectors comprising the nucleic acids, and cells (in vivo or in culture) comprising the nucleic acids and/or vectors of the disclosure. As one example, the present disclosure provides a virus vector comprising: (a) a modified AAV capsid of this disclosure; and (b) a nucleic acid comprising at least one terminal repeat sequence, wherein the nucleic acid is encapsidated by the AAV capsid.

[0104] Other suitable vectors include without limitation viral vectors (e.g., adenovirus, AAV, herpesvirus, vaccinia, poxviruses, baculoviruses, and the like), plasmids, phage, YACs, BACs, and the like. Such nucleic acids, vectors and cells can be used, for example, as reagents (e.g., helper packaging constructs or packaging cells) for the production of modified virus capsids or virus vectors as described herein.

[0105] Virus capsids according to the disclosure can be produced using any method known in the art, e.g., by expression from a baculovirus (Brown et al., (1994) Virology 198:477-488).

[0106] The modifications to the AAV capsid protein according to the present disclosure are “selective” modifications. This approach is in contrast to previous work with whole subunit or large domain swaps between AAV serotypes (see, e.g., international patent publication WO 00/28004 and Hauck et al., (2003) J. Virology 77:2768-2774). In particular embodiments, a “selective” modification results in the insertion and/or substitution and/or deletion of less than or equal to about 20, 18, 15, 12, 10, 9, 8, 7, 6, 5, 4 or 3 contiguous amino acids.

[0107] The modified capsid proteins and capsids of the disclosure can further comprise any other modification, now known or later identified.

[0108] For example, the AAV capsid proteins and virus capsids of the disclosure can be chimeric in that they can comprise all or a portion of a capsid subunit from another virus, optionally another parvovirus or AAV, e.g., as described in international patent publication WO 00/28004.

[0109] In some embodiments of this disclosure, the virus capsid can be a targeted virus capsid, comprising a targeting sequence (e.g., substituted or inserted in the viral capsid) that directs the virus capsid to interact with cell-surface molecules present on desired target tissue(s) (see, e.g., International patent publication WO 00/28004 and Hauck et al., (2003) J. Virology 77:2768-2774); Shi et al., Human Gene Therapy 17:353-361 (2006) [describing insertion of the integrin receptor binding motif RGD at positions 520 and/or 584 of the AAV capsid subunit]; and U.S. Pat. No. 7,314,912 [describing insertion of the PI peptide containing an RGD motif following amino acid positions 447, 534, 573 and 587 of the AAV2 capsid subunit]). Other positions within the AAV capsid subunit that tolerate insertions are known in the art (e.g., positions 449 and 588 described by Grifman et al., Molecular Therapy 3:964-975 (2001)).

[0110] For example, a virus capsid of this disclosure may have relatively inefficient tropism toward certain target tissues of interest (e.g., liver, skeletal muscle, heart, diaphragm muscle, kidney, brain, stomach, intestines, skin, endothelial cells, and/or lungs). A targeting sequence can advantageously be incorporated into these low-transduction vectors to thereby confer to the virus capsid a desired tropism and, optionally, selective tropism for particular tissue(s). AAV capsid proteins, capsids and vectors comprising targeting sequences are described, for example in international patent publication WO 00/28004. As another example, one or more non-naturally occurring amino acids as described by Wang et al., Annu Rev Biophys Biomol Struct. 35:225-49 (2006)) can be incorporated into an AAV capsid subunit of this disclosure at an orthogonal site as a means of redirecting a low-transduction vector to desired target tissue(s). These unnatural amino acids can advantageously be used to chemically link molecules of interest to the AAV capsid protein including without limitation: glycans (mannose-dendritic cell targeting); RGD, bombesin or a neuropeptide for targeted delivery to specific cancer cell types; RNA aptamers or peptides selected from phage display targeted to specific cell surface receptors such as growth factor receptors, integrins, and the like.

[0111] Methods of chemically modifying amino acids are known in the art (see, e.g., Greg T. Hermanson, Bioconjugate Techniques, 1st edition, Academic Press, 1996).

[0112] In some embodiments, the targeting sequence may be a virus capsid sequence (e.g., an autonomous parvovirus capsid sequence, AAV capsid sequence, or any other viral capsid sequence) that directs infection to a particular cell type(s).

[0113] As another nonlimiting example, a heparin or heparan sulfate binding domain (e.g., the respiratory syncytial virus heparin binding domain) may be inserted or substituted into a capsid subunit that does not typically bind HS receptors (e.g., AAV4, AAV5) to confer heparin and/or heparan sulfate binding to the resulting mutant.

[0114] B19 infects primary erythroid progenitor cells using globoside as its receptor (Brown et al, (1993) Science 262: 114). The structure of B19 has been determined to 8 Å resolution (Agbandje-McKenna et al, (1994) Virology 203: 106). The region of the B19 capsid that binds to globoside has been mapped between amino acids 399-406 (Chapman et al, (1993) Virology 194:419), a looped out region between β-barrel structures E and F (Chipman et al, (1996) Proc. Nat. Acad. Sci. USA 93:7502). Accordingly, the globoside receptor binding domain of the B19 capsid may be substituted into an AAV capsid protein of this disclosure to target a virus capsid or virus vector comprising the same to erythroid cells.

[0115] In some embodiments, the exogenous targeting sequence may be any amino acid sequence encoding a peptide that alters the tropism of a virus capsid or virus vector comprising the modified AAV capsid protein. In particular embodiments, the targeting peptide or protein may be naturally occurring or, alternately, completely or partially synthetic. Exemplary targeting sequences include ligands and other peptides that bind to cell surface receptors and glycoproteins, such as ROD peptide sequences, bradykinin, hormones, peptide growth factors (e.g., epidermal growth factor, nerve growth factor, fibroblast growth factor, platelet-derived growth factor, insulin-like growth factors I and II, etc.), cytokines, melanocyte stimulating hormone (e.g., a, β or γ), neuropeptides and endorphins, and the like, and fragments thereof that retain the ability to target cells to their cognate receptors. Other illustrative peptides and proteins include substance P, keratinocyte growth factor, neuropeptide Y, gastrin releasing peptide, interleukin 2, hen egg white lysozyme, erythropoietin, gonadolibcrin, corticostatin, β-endorphin, leu-enkephalin, rimorphin, alpha-neo-enkephalin, angiotensin, pneumadin, vasoactive intestinal peptide, neurotensin, motilin, and fragments thereof as described above. As yet a further alternative, the binding domain from a toxin (e.g., tetanus toxin or snake toxins, such as alpha-bungarotoxin, and the like) can be substituted into the capsid protein as a targeting sequence. In a yet further representative embodiment, the AAV capsid protein can be modified by substitution of a “nonclassical” import/export signal peptide (e.g., fibroblast growth factor-1 and -2, interleukin 1, HIV-1 Tat protein, herpes virus VP22 protein, and the like) as described by Cleves (Current Biology 7:R318 (1997)) into the AAV capsid protein. Also encompassed are peptide motifs that direct uptake by specific cells, e.g., a FVFLP (SEQ ID NO: 83) peptide motif triggers uptake by liver cells.

[0116] Phage display techniques, as well as other techniques known in the art, may be used to identify peptides that recognize any cell type of interest.

[0117] The targeting sequence may encode any peptide that targets to a cell surface binding site, including receptors (e.g., protein, carbohydrate, glycoprotein or proteoglycan). Examples of cell surface binding sites include, but are not limited to, heparan sulfate, chondroitin sulfate, and other glycosaminoglycans, sialic acid moieties found on mucins, glycoproteins, and gangliosides, MHC 1 glycoproteins, carbohydrate components found on membrane glycoproteins, including, mannose, N-acetylgalactosamine, N-acetyl-glucosamine, fucose, galactose, and the like.

[0118] In particular embodiments, a heparan sulfate (HS) or heparin binding domain is substituted into the virus capsid (for example, in an AAV capsid that otherwise does not bind to HS or heparin). It is known in the art that HS/heparin binding is mediated by a “basic patch” that is rich in arginines and/or lysines. In exemplary embodiments, a sequence following the motif BXXB (SEQ ID NO: 84), where “B” is a basic residue and X is neutral and/or hydrophobic can be employed. As a nonlimiting example, BXXB can be RGNR (SEQ ID NO: 85). As another nonlimiting example, BXXB is substituted for amino acid positions 262 through 265 in the native AAV2 capsid protein or at the corresponding position(s) in the capsid protein of another AAV serotype.

[0119] Table 7 shows other nonlimiting examples of suitable targeting sequences.

TABLE 7
AAV Targeting sequences

| | SEQ | |
|---|---|---|
| | ID | |
| Sequence | NO | Reference |
| NSVRDL(G/S) | 86 | Muller et al., Nature Biotechnology 21: 1040-1046 |
| | | (2003) |
| PRSVTVP | 87 | Muller et al., Nature Biotechnology 21: 1040-1046 |
| | | (2003) |
| NSVSSX(S/A) | 88 | Muller et al., Nature Biotechnology 21: 1040-1046 |
| | | (2003) |
| NGRAHA | 89 | Grifman et al., Molecular Therapy 3:964-975 (2001) |
| QPEHSST | 90 | Work et al., Molecular Therapy 13:683-693 (2006) |
| VNTANST | 91 | Work et al., Molecular Therapy 13:683-693 (2006) |
| HGPMQS | 92 | Work et al., Molecular Therapy 13:683-693 (2006) |
| PHKPPLA | 93 | Work et al., Molecular Therapy 13:683-693 (2006) |
| IKNNEMW | 94 | Work et al., Molecular Therapy 13:683-693 (2006) |
| RNLDTPM | 95 | Work et al., Molecular Therapy 13:683-693 (2006) |
| VDSHRQS | 96 | Work et al., Molecular Therapy 13:683-693 (2006) |
| YDSKTKT | 97 | Work et al., Molecular Therapy 13:683-693 (2006) |
| SQLPHQK | 98 | Work et al., Molecular Therapy 13:683-693 (2006) |
| STMQQNT | 99 | Work et al., Molecular Therapy 13:683-693 (2006) |
| TERYMTQ | 100 | Work et al., Molecular Therapy 13:683-693 (2006) |
| QPEHSST | 101 | Work et al., Molecular Therapy 13:683-693 (2006) |
| DASLSTS | 102 | Work et al., Molecular Therapy 13:683-693 (2006) |
| DLPNKT | 103 | Work et al., Molecular Therapy 13:683-693 (2006) |
| DLTAARL | 104 | Work et al., Molecular Therapy 13:683-693 (2006) |
| EPHQFNY | 105 | Work et al., Molecular Therapy 13:683-693 (2006) |
| EPQSNHT | 106 | Work et al., Molecular Therapy 13:683-693 (2006) |
| MSSWPSQ | 107 | Work et al., Molecular Therapy 13:683-693 (2006) |
| NPKHNAT | 108 | Work et al., Molecular Therapy 13:683-693 (2006) |
| PDGMRTT | 109 | Work et al., Molecular Therapy 13:683-693 (2006) |
| PNNNKTT | 110 | Work et al., Molecular Therapy 13:683-693 (2006) |
| QSTTHDS | 111 | Work et al., Molecular Therapy 13:683-693 (2006) |
| TGSKQKQ | 112 | Work et al., Molecular Therapy 13:683-693 (2006) |
| SLKHQAL | 113 | Work et al., Molecular Therapy 13:683-693 (2006) |
| SPIDGEQ | 114 | Work et al., Molecular Therapy 13:683-693 (2006) |
| WIFPWIQL | 115 | Hajitou et al., TCM 16:80-88 (2006) |
| CDCRGDCFC | 116 | Hajitou et al., TCM 16:80-88 (2006) |
| CNGRC | 117 | Hajitou et al., TCM 16:80-88 (2006) |
| CPRECES | 118 | Hajitou et al., TCM 16:80-88 (2006) |
| CTTHWGFTLC | 119 | Hajitou et al., TCM 16:80-88 (2006) |
| CGRRAGGSC | 120 | Hajitou et al., TCM 16:80-88 (2006) |
| CKGGRAKDC | 121 | Hajitou et al., TCM 16:80-88 (2006) |
| CVPELGHEC | 122 | Hajitou et al., TCM 16:80-88 (2006) |
| CRRETAWAK | 123 | Koivunen et al., J. Nucl. Med. 40:883-888 (1999) |
| VSWFSHRYSPFAV | 124 | Koivunen et al., J. Nucl. Med. 40:883-888 (1999) |
| S | | |
| GYRDGYAGPILYN | 125 | Koivunen et al., J. Nucl. Med. 40:883-888 (1999) |
| XXXY*XXX | 126 | Koivunen et al., J. Nucl. Med. 40:883-888 (1999) |
| Y*E/MNW | 127 | Koivunen et al., J. Nucl. Med. 40:883-888 (1999) |
| RPLPPLP | 128 | Koivunen et al., J. Nucl. Med. 40:883-888 (1999) |
| APPLPPR | 129 | Koivunen et al., J. Nucl. Med. 40:883-888 (1999) |
| DVFYPYPYASGS | 130 | Koivunen et al., J. Nucl. Med. 40:883-888 (1999) |
| MYWYPY | 131 | Koivunen et al., J. Nucl. Med. 40:883-888 (1999) |
| DITWDQLWDLMK | 132 | Koivunen et al., J. Nucl. Med. 40:883-888 (1999) |
| CWDD(G/L)WLC | 133 | Koivunen et al., J. Nucl. Med. 40:883-888 (1999) |
| EWCEYLGGYLRCY | 134 | Koivunen et al., J. Nucl. Med. 40:883-888 (1999) |
| A | | |
| YXCXXGPXTWXCX | 135 | Koivunen et al., J. Nucl. Med. 40:883-888 (1999) |
| P | | |
| IEGPTLRQWLAARA | 136 | Koivunen et al., J. Nucl. Med. 40:883-888 (1999) |
| LWXX(Y/W/F/H) | 137 | Koivunen et al., J. Nucl. Med. 40:883-888 (1999) |
| XFXXYLW | 138 | Koivunen et al., J. Nucl. Med. 40:883-888 (1999) |
| RWGLCD | 139 | Koivunen et al., J. Nucl. Med. 40:883-888 (1999) |
| MSRPACPPNDKYE | 140 | Koivunen et al., J. Nucl. Med. 40:883-888 (1999) |
| CLRSGRGC | 141 | Koivunen et al., J. Nucl. Med. 40:883-888 (1999) |
| CHWMFSPWC | 142 | Koivunen et al., J. Nucl. Med. 40:883-888 (1999) |
| WXXF | 143 | Koivunen et al., J. Nucl. Med. 40:883-888 (1999) |
| CSSRLDAC | 144 | Koivunen et al., J. Nucl. Med. 40:883-888 (1999) |
| CLPVASC | 145 | Koivunen et al., J. Nucl. Med. 40:883-888 (1999) |
| CGFECVRQCPERC | 146 | Koivunen et al., J. Nucl. Med. 40:883-888 (1999) |
| CVALCREACGEGC | 147 | Koivunen et al., J. Nucl. Med. 40:883-888 (1999) |
| SWCEPGWCR | 148 | Koivunen et al., J. Nucl. Med. 40:883-888 (1999) |
| YSGWGW | 149 | Koivunen et al., J. Nucl. Med. 40:883-888 (1999) |
| GLSGGRS | 150 | Koivunen et al., J. Nucl. Med. 40:883-888 (1999) |
| LMLPRAD | 151 | Koivunen et al., J. Nucl. Med. 40:883-888 (1999) |
| CSCFRDVCC | 152 | Koivunen et al., J. Nucl. Med. 40:883-888 (1999) |
| CRDVVSVIC | 153 | Koivunen et al., J. Nucl. Med. 40:883-888 (1999) |
| CNGRC | 154 | Koivunen et al., J. Nucl. Med. 40:883-888 (1999) |
| MARSGL | 155 | Newton & Deutscher, Phage Peptide Display in |
| | | Handbook of Experimental Pharmacology, pages |
| | | 145-163, Springer-Verlag, Berlin (2008) |
| MARAKE | 156 | Newton & Deutscher, Phage Peptide Display in |
| | | Handbook of Experimental Pharmacology, pages |
| | | 145-163, Springer-Verlag, Berlin (2008) |
| MSRTMS | 157 | Newton & Deutscher, Phage Peptide Display in |
| | | Handbook of Experimental Pharmacology, pages |
| | | 145-163, Springer-Verlag, Berlin (2008) |
| KCCYSL | 158 | Newton & Deutscher, Phage Peptide Display in |
| | | Handbook of Experimental Pharmacology, pages |
| | | 145-163, Springer-Verlag, Berlin (2008) |
| MYWGDSHWLQYW | 159 | Newton & Deutscher, Phage Peptide Display in |
| YE | | Handbook of Experimental Pharmacology, pages |
| | | 145-163, Springer-Verlag, Berlin (2008) |
| MQLPLAT | 160 | Newton & Deutscher, Phage Peptide Display in |
| | | Handbook of Experimental Pharmacology, pages |
| | | 145-163, Springer-Verlag, Berlin (2008) |
| EWLS | 161 | Newton & Deutscher, Phage Peptide Display in |
| | | Handbook of Experimental Pharmacology, pages |
| | | 145-163, Springer-Verlag, Berlin (2008) |
| SNEW | 162 | Newton & Deutscher, Phage Peptide Display in |
| | | Handbook of Experimental Pharmacology, pages |
| | | 145-163, Springer-Verlag, Berlin (2008) |
| TNYL | 163 | Newton & Deutscher, Phage Peptide Display in |
| | | Handbook of Experimental Pharmacology, pages |
| | | 145-163, Springer-Verlag, Berlin (2008) |
| WIFPWIQL | 164 | Newton & Deutscher, Phage Peptide Display in |
| | | Handbook of Experimental Pharmacology, pages |
| | | 145-163, Springer-Verlag, Berlin (2008) |
| WDLAWMFRLPVG | 165 | Newton & Deutscher, Phage Peptide Display in |
| | | Handbook of Experimental Pharmacology, pages |
| | | 145-163, Springer-Verlag, Berlin (2008) |
| CTVALPGGYVRVC | 166 | Newton & Deutscher, Phage Peptide Display in |
| | | Handbook of Experimental Pharmacology, pages |
| | | 145-163, Springer-Verlag, Berlin (2008) |
| CVPELGHEC | 167 | Newton & Deutscher, Phage Peptide Display in |
| | | Handbook of Experimental Pharmacology, pages |
| | | 145-163, Springer-Verlag, Berlin (2008) |
| CGRRAGGSC | 168 | Newton & Deutscher, Phage Peptide Display in |
| | | Handbook of Experimental Pharmacology, pages |
| | | 145-163, Springer-Verlag, Berlin (2008) |
| CVAYCIEHHCWTC | 169 | Newton & Deutscher, Phage Peptide Display in |
| | | Handbook of Experimental Pharmacology, pages |
| | | 145-163, Springer-Verlag, Berlin (2008) |
| CVFAHNYDYLVC | 170 | Newton & Deutscher, Phage Peptide Display in |
| | | Handbook of Experimental Pharmacology, pages |
| | | 145-163, Springer-Verlag, Berlin (2008) |
| CVFTSNYAFC | 171 | Newton & Deutscher, Phage Peptide Display in |
| | | Handbook of Experimental Pharmacology, pages |
| | | 145-163, Springer-Verlag, Berlin (2008) |
| VHSPNKK | 172 | Newton & Deutscher, Phage Peptide Display in |
| | | Handbook of Experimental Pharmacology, pages |
| | | 145-163, Springer-Verlag, Berlin (2008) |
| CDCRGDCFC | 173 | Newton & Deutscher, Phage Peptide Display in |
| | | Handbook of Experimental Pharmacology, pages |
| | | 145-163, Springer-Verlag, Berlin (2008) |
| CRGDGWC | 174 | Newton & Deutscher, Phage Peptide Display in |
| | | Handbook of Experimental Pharmacology, pages |
| | | 145-163, Springer-Verlag, Berlin (2008) |
| XRGCDX | 175 | Newton & Deutscher, Phage Peptide Display in |
| | | Handbook of Experimental Pharmacology, pages |
| | | 145-163, Springer-Verlag, Berlin (2008) |
| PXX(S/T) | 176 | Newton & Deutscher, Phage Peptide Display in |
| | | Handbook of Experimental Pharmacology, pages |
| | | 145-163, Springer-Verlag, Berlin (2008) |
| CTTHWGFTLC | 177 | Newton & Deutscher, Phage Peptide Display in |
| | | Handbook of Experimental Pharmacology, pages |
| | | 145-163, Springer-Verlag, Berlin (2008) |
| SGKGPRQITAL | 178 | Newton & Deutscher, Phage Peptide Display in |
| | | Handbook of Experimental Pharmacology, pages |
| | | 145-163, Springer-Verlag, Berlin (2008) |
| A(A/Q)(N/A)(L/Y)(T/V/ | 179 | Newton & Deutscher, Phage Peptide Display in |
| M/R)(R/K) | | Handbook of Experimental Pharmacology, pages |
| | | 145-163, Springer-Verlag, Berlin (2008) |
| VYMSPF | 180 | Newton & Deutscher, Phage Peptide Display in |
| | | Handbook of Experimental Pharmacology, pages |
| | | 145-163, Springer-Verlag, Berlin (2008) |
| MQLPLAT | 181 | Newton & Deutscher, Phage Peptide Display in |
| | | Handbook of Experimental Pharmacology, pages |
| | | 145-163, Springer-Verlag, Berlin (2008) |
| ATWLPPR | 182 | Newton & Deutscher, Phage Peptide Display in |
| | | Handbook of Experimental Pharmacology, pages |
| | | 145-163, Springer-Verlag, Berlin (2008) |
| HTMYYHHYQHHL | 183 | Newton & Deutscher, Phage Peptide Display in |
| | | Handbook of Experimental Pharmacology, pages |
| | | 145-163, Springer-Verlag, Berlin (2008) |
| SEVGCRAGPLQWL | 184 | Newton & Deutscher, Phage Peptide Display in |
| CEKYFG | | Handbook of Experimental Pharmacology, pages |
| | | 145-163, Springer-Verlag, Berlin (2008) |
| CGLLPVGRPDRNV | 185 | Newton & Deutscher, Phage Peptide Display in |
| WRWLC | | Handbook of Experimental Pharmacology, pages |
| | | 145-163, Springer-Verlag, Berlin (2008) |
| CKGQCDRFKGLPW | 186 | Newton & Deutscher, Phage Peptide Display in |
| EC | | Handbook of Experimental Pharmacology, pages |
| | | 145-163, Springer-Verlag, Berlin (2008) |
| SGRSA | 187 | Newton & Deutscher, Phage Peptide Display in |
| | | Handbook of Experimental Pharmacology, pages |
| | | 145-163, Springer-Verlag, Berlin (2008) |
| WGFP | 188 | Newton & Deutscher, Phage Peptide Display in |
| | | Handbook of Experimental Pharmacology, pages |
| | | 145-163, Springer-Verlag, Berlin (2008) |
| LWXXAr | 189 | Newton & Deutscher, Phage Peptide Display in |
| | | Handbook of Experimental Pharmacology, pages |
| | | 145-163, Springer-Verlag, Berlin (2008) |
| XFXXYLW | 190 | Newton & Deutscher, Phage Peptide Display in |
| | | Handbook of Experimental Pharmacology, pages |
| | | 145-163, Springer-Verlag, Berlin (2008) |
| AEPMPHSLNFSQYL | 191 | Newton & Deutscher, Phage Peptide Display in |
| WYT | | Handbook of Experimental Pharmacology, pages |
| | | 145-163, Springer-Verlag, Berlin (2008) |
| WAY(W/F)SP | 192 | Newton & Deutscher, Phage Peptide Display in |
| | | Handbook of Experimental Pharmacology, pages |
| | | 145-163, Springer-Verlag, Berlin (2008) |
| IELLQAR | 193 | Newton & Deutscher, Phage Peptide Display in |
| | | Handbook of Experimental Pharmacology, pages |
| | | 145-163, Springer-Verlag, Berlin (2008) |
| DITWDQLWDLMK | 194 | Newton & Deutscher, Phage Peptide Display in |
| | | Handbook of Experimental Pharmacology, pages |
| | | 145-163, Springer-Verlag, Berlin (2008) |
| AYTKCSRQWRTCM | 195 | Newton & Deutscher, Phage Peptide Display in |
| TTH | | Handbook of Experimental Pharmacology, pages |
| | | 145-163, Springer-Verlag, Berlin (2008) |
| PQNSKIPGPTFLDP | 196 | Newton & Deutscher, Phage Peptide Display in |
| H | | Handbook of Experimental Pharmacology, pages |
| | | 145-163, Springer-Verlag, Berlin (2008) |
| SMEPALPDWWWK | 197 | Newton & Deutscher, Phage Peptide Display in |
| MFK | | Handbook of Experimental Pharmacology, pages |
| | | 145-163, Springer-Verlag, Berlin (2008) |
| ANTPCGPYTHDCP | 198 | Newton & Deutscher, Phage Peptide Display in |
| VKR | | Handbook of Experimental Pharmacology, pages |
| | | 145-163, Springer-Verlag, Berlin (2008) |
| TACHQHVRMVRP | 199 | Newton & Deutscher, Phage Peptide Display in |
| | | Handbook of Experimental Pharmacology, pages |
| | | 145-163, Springer-Verlag, Berlin (2008) |
| VPWMEPAYQRFL | 200 | Newton & Deutscher, Phage Peptide Display in |
| | | Handbook of Experimental Pharmacology, pages |
| | | 145-163, Springer-Verlag, Berlin (2008) |
| DPRATPGS | 201 | Newton & Deutscher, Phage Peptide Display in |
| | | Handbook of Experimental Pharmacology, pages |
| | | 145-163, Springer-Verlag, Berlin (2008) |
| FRPNRAQDYNTN | 202 | Newton & Deutscher, Phage Peptide Display in |
| | | Handbook of Experimental Pharmacology, pages |
| | | 145-163, Springer-Verlag, Berlin (2008) |
| CTKNSYLMC | 203 | Newton & Deutscher, Phage Peptide Display in |
| | | Handbook of Experimental Pharmacology, pages |
| | | 145-163, Springer-Verlag, Berlin (2008) |
| C(R/Q)L/RT(G/N)XX | 204 | Newton & Deutscher, Phage Peptide Display in |
| G(A/V)GC | | Handbook of Experimental Pharmacology, pages |
| | | 145-163, Springer-Verlag, Berlin (2008) |
| CPIEDRPMC | 205 | Newton & Deutscher, Phage Peptide Display in |
| | | Handbook of Experimental Pharmacology, pages |
| | | 145-163, Springer-Verlag, Berlin (2008) |
| HEWSYLAPYPWF | 206 | Newton & Deutscher, Phage Peptide Display in |
| | | Handbook of Experimental Pharmacology, pages |
| | | 145-163, Springer-Verlag, Berlin (2008) |
| MCPKHPLGC | 207 | Newton & Deutscher, Phage Peptide Display in |
| | | Handbook of Experimental Pharmacology, pages |
| | | 145-163, Springer-Verlag, Berlin (2008) |
| RMWPSSTVNLSAG | 208 | Newton & Deutscher, Phage Peptide Display in |
| RR | | Handbook of Experimental Pharmacology, pages |
| | | 145-163, Springer-Verlag, Berlin (2008) |
| SAKTAVSQRVWLP | 209 | Newton & Deutscher, Phage Peptide Display in |
| SHRGGEP | | Handbook of Experimental Pharmacology, pages |
| | | 145-163, Springer-Verlag, Berlin (2008) |
| KSREHVNNSACPS | 210 | Newton & Deutscher, Phage Peptide Display in |
| KRITAAL | | Handbook of Experimental Pharmacology, pages |
| | | 145-163, Springer-Verlag, Berlin (2008) |
| EGFR | 211 | Newton & Deutscher, Phage Peptide Display in |
| | | Handbook of Experimental Pharmacology, pages |
| | | 145-163, Springer-Verlag, Berlin (2008) |
| AGLGVR | 212 | Newton & Deutscher, Phage Peptide Display in |
| | | Handbook of Experimental Pharmacology, pages |
| | | 145-163, Springer-Verlag, Berlin (2008) |
| GTRQGHTMRLGVS | 213 | Newton & Deutscher, Phage Peptide Display in |
| DG | | Handbook of Experimental Pharmacology, pages |
| | | 145-163, Springer-Verlag, Berlin (2008) |
| IAGLATPGWSHWLA | 214 | Newton & Deutscher, Phage Peptide Display in |
| L | | Handbook of Experimental Pharmacology, pages |
| | | 145-163, Springer-Verlag, Berlin (2008) |
| SMSIARL | 215 | Newton & Deutscher, Phage Peptide Display in |
| | | Handbook of Experimental Pharmacology, pages |
| | | 145-163, Springer-Verlag, Berlin (2008) |
| HTFEPGV | 216 | Newton & Deutscher, Phage Peptide Display in |
| | | Handbook of Experimental Pharmacology, pages |
| | | 145-163, Springer-Verlag, Berlin (2008) |
| NTSLKRISNKR1RR | 217 | Newton & Deutscher, Phage Peptide Display in |
| K | | Handbook of Experimental Pharmacology, pages |
| | | 145-163, Springer-Verlag, Berlin (2008) |
| LRIKRKRRKRKKTR | 218 | Newton & Deutscher, Phage Peptide Display in |
| K | | Handbook of Experimental Pharmacology, pages |
| | | 145-163, Springer-Verlag, Berlin (2008) |

[0120] As yet a further embodiment, the targeting sequence may be a peptide that can be used for chemical coupling (e.g., can comprise arginine and/or lysine residues that can be chemically coupled through their R groups) to another molecule that targets entry into a cell.

[0121] As another embodiment, the AAV capsid protein or virus capsid of the disclosure can comprise a mutation as described in WO 2006/066066. For example, the capsid protein can comprise a selective amino acid substitution at amino acid position 263, 705, 708 and/or 716 of the native AAV2 capsid protein or a corresponding change(s) in a capsid protein from another AAV serotype.

[0122] Additionally, or alternatively, in representative embodiments, the capsid protein, virus capsid or vector comprises a selective amino acid insertion directly following amino acid position 264 of the AAV2 capsid protein or a corresponding change in the capsid protein from other AAV. By “directly following amino acid position X” it is intended that the insertion immediately follows the indicated amino acid position (for example, “following amino acid position 264” indicates a point insertion at position 265 or a larger insertion, e.g., from positions 265 to 268, etc.).

[0123] Furthermore, in representative embodiments, the capsid protein, virus capsid or vector of this disclosure can comprise amino acid modifications such as described in PCT Publication No. WO 2010/093784 (e.g., 2i8) and/or in PCT Publication No. WO 2014/144229 (e.g., dual glycan).

[0124] In some embodiments of this disclosure, the capsid protein, virus capsid or vector of this disclosure can have equivalent or enhanced transduction efficiency relative to the transduction efficiency of the AAV serotype from which the capsid protein, virus capsid or vector of this disclosure originated. In some embodiments of this disclosure, the capsid protein, virus capsid or vector of this disclosure can have reduced transduction efficiency relative to the transduction efficiency of the AAV serotype from which the capsid protein, virus capsid or vector of this disclosure originated. In some embodiments of this disclosure, the capsid protein, virus capsid or vector of this disclosure can have equivalent or enhanced tropism relative to the tropism of the AAV serotype from which the capsid protein, virus capsid or vector of this disclosure originated. In some embodiments of this disclosure, the capsid protein, virus capsid or vector of this disclosure can have an altered or different tropism relative to the tropism of the AAV serotype from which the capsid protein, virus capsid or vector of this disclosure originated. In some embodiments of this disclosure, the capsid protein, virus capsid or vector of this disclosure can have or be engineered to have tropism for brain tissue. In some embodiments of this disclosure, the capsid protein, virus capsid or vector of this disclosure can have or be engineered to have tropism for liver tissue.

[0125] The foregoing embodiments can be used to deliver a heterologous nucleic acid to a cell or subject as described herein. For example, the modified vector can be used to treat a lysosomal storage disorder such as a mucopolysaccharidosis disorder (e.g., Sly syndrome [β-glucuronidase], Hurler Syndrome [alpha-L-iduronidase], Scheie Syndrome [alpha-L-iduronidase], Hurler-Scheie Syndrome [alpha-L-iduronidase], Hunter's Syndrome [iduronate sulfatase], Sanfilippo Syndrome A [heparan sulfamidase], B [N-acetylglucosaminidase], C [acetyl-CoA:alpha-glucosaminide acetyltransferase], D [N-acetylglucosamine 6-sulfatase], Morquio Syndrome A [galactose-6-sulfate sulfatase], B [β-galactosidase], Maroteaux-Lamy Syndrome [N-acetylgalactosamine-4-sulfatase], etc.), Fabry disease (a-galactosidase), Gaucher's disease (glucocerebrosidase), or a glycogen storage disorder (e.g., Pompe disease; lysosomal acid alpha-glucosidase) as described herein.

[0126] Those skilled in the art will appreciate that for some AAV capsid proteins the corresponding modification will be an insertion and/or a substitution, depending on whether the corresponding amino acid positions are partially or completely present in the virus or, alternatively, are completely absent. As discussed elsewhere herein, the corresponding amino acid position(s) will be readily apparent to those skilled in the art using well-known techniques.

[0127] The disclosure also encompasses virus vectors comprising the modified capsid proteins and capsids of the disclosure. In particular embodiments, the virus vector is a parvovirus vector (e.g., comprising a parvovirus capsid and/or vector genome), for example, an AAV vector (e.g., comprising an AAV capsid and/or vector genome). In representative embodiments, the virus vector comprises a modified AAV capsid comprising a modified capsid subunit of the disclosure and a vector genome.

[0128] For example, in representative embodiments, the virus vector comprises: (a) a modified virus capsid (e.g., a modified AAV capsid) comprising a modified capsid protein of the disclosure; and (b) a nucleic acid comprising a terminal repeat sequence (e.g., an AAV TR), wherein the nucleic acid comprising the terminal repeat sequence is encapsidated by the modified virus capsid. The nucleic acid can optionally comprise two terminal repeats (e.g., two AAV TRs).

[0129] In representative embodiments, the virus vector is a recombinant virus vector comprising a heterologous nucleic acid encoding a polypeptide or functional RNA of interest. Recombinant virus vectors are described in more detail below.

[0130] In particular embodiments, the virus vectors of the disclosure (i) have reduced transduction of liver as compared with the level of transduction by a virus vector without the modified capsid protein; (ii) exhibit enhanced systemic transduction by the virus vector in an animal subject as compared with the level observed by a virus vector without the modified capsid protein; (iii) demonstrate enhanced movement across endothelial cells as compared with the level of movement by a virus vector without the modified capsid protein, and/or (iv) exhibit a selective enhancement in transduction of muscle tissue (e.g., skeletal muscle, cardiac muscle and/or diaphragm muscle), (v) exhibit a selective enhancement in transduction of liver tissue, and/or (vi) reduced transduction of brain tissues (e.g., neurons) as compared with the level of transduction by a virus vector without the modified capsid protein. In particular embodiments, the virus vector has systemic transduction toward liver.

[0131] It will be understood by those skilled in the art that the modified capsid proteins, virus capsids and virus vectors of the disclosure exclude those capsid proteins, capsids and virus vectors that have the indicated amino acids at the specified positions in their native state (i.e., are not mutants).

### Methods of Producing Virus Vectors

[0132] The present disclosure further provides methods of producing the inventive virus vectors. Thus, in one embodiment, the present disclosure provides a method of producing an AAV vector that evades neutralizing antibodies, comprising: a) identifying contact amino acid residues that form a three dimensional antigenic footprint on an AAV capsid protein; b) generating a library of AAV capsid proteins comprising amino acid substitutions of the contact amino acid residues identified in (a); c) producing AAV particles comprising capsid proteins from the library of AAV capsid proteins of (b); d) contacting the AAV particles of (c) with cells under conditions whereby infection and replication can occur; e) selecting AAV particles that can complete at least one infectious cycle and replicate to titers similar to control AAV particles: 1) contacting the AAV particles selected in (e) with neutralizing antibodies and cells under conditions whereby infection and replication can occur; and g) selecting AAV particles that are not neutralized by the neutralizing antibodies of (f). Nonlimiting examples of methods for identifying contact amino acid residues include peptide epitope mapping and/or cryo-electron microscopy.

[0133] Resolution and identification of the antibody contact residues within the three dimensional antigenic footprint allows for their subsequent modification through random, rational and/or degenerate mutagenesis to generate antibody-evading AAV capsids that can be identified through further selection and/or screening.

[0134] Thus, in a further embodiment, the present disclosure provides a method of producing an AAV vector that evades neutralizing antibodies, comprising: a) identifying contact amino acid residues that form a three dimensional antigenic footprint on an AAV capsid protein; b) generating AAV capsid proteins comprising amino acid substitutions of the contact amino acid residues identified in (a) by random, rational and/or degenerate mutagenesis; c) producing AAV particles comprising capsid proteins from the AAV capsid proteins of (b); d) contacting the AAV particles of (c) with cells under conditions whereby infection and replication can occur; e) selecting AAV particles that can complete at least one infectious cycle and replicate to titers similar to control AAV particles; f) contacting the AAV particles selected in (e) with neutralizing antibodies and cells under conditions whereby infection and replication can occur; and g) selecting AAV particles that are not neutralized by the neutralizing antibodies of (f).

[0135] Nonlimiting examples of methods for identifying contact amino acid residues include peptide epitope mapping and/or cryo-electron microscopy. Methods of generating AAV capsid proteins comprising amino acid substitutions of contact amino acid residues by random, rational and/or degenerate mutagenesis are known in the art.

[0136] This comprehensive approach presents a platform technology that can be applied to modifying any AAV capsid. Application of this platform technology yields AAV antigenic variants derived from the original AAV capsid template without loss of transduction efficiency. As one advantage and benefit, application of this technology will expand the cohort of patients eligible for gene therapy with AAV vectors.

[0137] In one embodiment, the present disclosure provides a method of producing a virus vector, the method comprising providing to a cell: (a) a nucleic acid template comprising at least one TR sequence (e.g., AAV TR sequence), and (b) AAV sequences sufficient for replication of the nucleic acid template and encapsidation into AAV capsids (e.g., AAV rep sequences and AAV cap sequences encoding the AAV capsids of the disclosure). Optionally, the nucleic acid template further comprises at least one heterologous nucleic acid sequence. In particular embodiments, the nucleic acid template comprises two AAV ITR sequences, which are located 5′ and 3′ to the heterologous nucleic acid sequence (if present), although they need not be directly contiguous thereto.

[0138] The nucleic acid template and AAV rep and cap sequences are provided under conditions such that virus vector comprising the nucleic acid template packaged within the AAV capsid is produced in the cell. The method can further comprise the step of collecting the virus vector from the cell. The virus vector can be collected from the medium and/or by lysing the cells.

[0139] The cell can be a cell that is permissive for AAV viral replication. Any suitable cell known in the art may be employed. In particular embodiments, the cell is a mammalian cell. As another option, the cell can be a trans-complementing packaging cell line that provides functions deleted from a replication-defective helper virus, e.g., 293 cells or other E1a trans-complementing cells.

[0140] The AAV replication and capsid sequences may be provided by any method known in the art. Current protocols typically express the AAV rep/cap genes on a single plasmid. The AAV replication and packaging sequences need not be provided together, although it may be convenient to do so. The AAV rep and/or cap sequences may be provided by any viral or non-viral vector. For example, the rep/cap sequences may be provided by a hybrid adenovirus or herpesvirus vector (e.g., inserted into the E1a or E3 regions of a deleted adenovirus vector). EBV vectors may also be employed to express the AAV cap and rep genes. One advantage of this method is that EBV vectors are episomal, yet will maintain a high copy number throughout successive cell divisions (i.e., are stably integrated into the cell as extra-chromosomal elements, designated as an “EBV based nuclear episome,” see Margolski, (1992) Curr. Top. Microbiol. Immun. 158:67).

[0141] As a further alternative, the rep/cap sequences may be stably incorporated into a cell.

[0142] Typically the AAV rep/cap sequences will not be flanked by the TRs, to prevent rescue and/or packaging of these sequences.

[0143] The nucleic acid template can be provided to the cell using any method known in the art. For example, the template can be supplied by a non-viral (e.g., plasmid) or viral vector. In particular embodiments, the nucleic acid template is supplied by a herpesvirus or adenovirus vector (e.g., inserted into the E1a or E3 regions of a deleted adenovirus). As another illustration, Palombo et al., (1998) J. Virology 72:5025, describes a baculovirus vector carrying a reporter gene flanked by the AAV TRs. EBV vectors may also be employed to deliver the template, as described above with respect to the rep/cap genes.

[0144] In another representative embodiment, the nucleic acid template is provided by a replicating rAAV virus. In still other embodiments, an AAV provirus comprising the nucleic acid template is stably integrated into the chromosome of the cell.

[0145] To enhance virus titers, helper virus functions (e.g., adenovirus or herpesvirus) that promote a productive AAV infection can be provided to the cell. Helper virus sequences necessary for AAV replication are known in the art. Typically, these sequences will be provided by a helper adenovirus or herpesvirus vector. Alternatively, the adenovirus or herpesvirus sequences can be provided by another non-viral or viral vector, e.g., as a noninfectious adenovirus miniplasmid that carries all of the helper genes that promote efficient AAV production as described by Ferrari et al., (1997) Nature Med. 3: 1295, and U.S. Pat. Nos. 6,040,183 and 6,093,570.

[0146] Further, the helper virus functions may be provided by a packaging cell with the helper sequences embedded in the chromosome or maintained as a stable extrachromosomal element. Generally, the helper virus sequences cannot be packaged into AAV virions, e.g., are not flanked by TRs.

[0147] Those skilled in the art will appreciate that it may be advantageous to provide the

[0148] AAV replication and capsid sequences and the helper virus sequences (e.g., adenovirus sequences) on a single helper construct. This helper construct may be a non-viral or viral construct. As one nonlimiting illustration, the helper construct can be a hybrid adenovirus or hybrid herpesvirus comprising the AAV rep/cap genes.

[0149] In one particular embodiment, the AAV rep/cap sequences and the adenovirus helper sequences are supplied by a single adenovirus helper vector. This vector further can further comprise the nucleic acid template. The AAV rep/cap sequences and/or the rAAV template can be inserted into a deleted region (e.g., the E1a or E3 regions) of the adenovirus.

[0150] In a further embodiment, the AAV rep/cap sequences and the adenovirus helper sequences are supplied by a single adenovirus helper vector. According to this embodiment, the rAAV template can be provided as a plasmid template.

[0151] In another illustrative embodiment, the AAV rep/cap sequences and adenovirus helper sequences are provided by a single adenovirus helper vector, and the rAAV template is integrated into the cell as a provirus. Alternatively, the rAAV template is provided by an EBV vector that is maintained within the cell as an extrachromosomal element (e.g., as an EBV based nuclear episome).

[0152] In a further exemplary embodiment, the AAV rep/cap sequences and adenovirus helper sequences are provided by a single adenovirus helper. The rAAV template can be provided as a separate replicating viral vector. For example, the rAAV template can be provided by a rAAV particle or a second recombinant adenovirus particle.

[0153] According to the foregoing methods, the hybrid adenovirus vector typically comprises the adenovirus 5′ and 3′ cis sequences sufficient for adenovirus replication and packaging (i.e., the adenovirus terminal repeats and PAC sequence). The AAV rep/cap sequences and, if present, the rAAV template are embedded in the adenovirus backbone and are flanked by the 5′ and 3′ cis sequences, so that these sequences may be packaged into adenovirus capsids. As described above, the adenovirus helper sequences and the AAV rep/cap sequences are generally not flanked by TRs so that these sequences are not packaged into the AAV virions.

[0154] Zhang et al., ((2001) Gene Ther. 18:704-12) describe a chimeric helper comprising both adenovirus and the AAV rep and cap genes.

[0155] Herpesvirus may also be used as a helper virus in AAV packaging methods. Hybrid herpesviruses encoding the AAV Rep protein(s) may advantageously facilitate scalable AAV vector production schemes. A hybrid herpes simplex virus type I (HSV-1) vector expressing the AAV-2 rep and cap genes has been described (Conway et al., (1999) Gene Therapy 6:986 and WO 00/17377.

[0156] As a further alternative, the virus vectors of the disclosure can be produced in insect cells using baculovirus vectors to deliver the rep/cap genes and rAAV template as described, for example, by Urabe et al., (2002) Human Gene Therapy 13: 1935-43.

[0157] AAV vector stocks free of contaminating helper virus may be obtained by any method known in the art. For example, AAV and helper virus may be readily differentiated based on size. AAV may also be separated away from helper virus based on affinity for a heparin substrate (Zolotukhin et al. (1999) Gene Therapy 6:973). Deleted replication-defective helper viruses can be used so that any contaminating helper virus is not replication competent. As a further alternative, an adenovirus helper lacking late gene expression may be employed, as only adenovirus early gene expression is required to mediate packaging of AAV virus. Adenovirus mutants defective for late gene expression are known in the art (e.g., ts100K and ts149 adenovirus mutants).

### Recombinant Virus Vectors

[0158] The virus vectors of the present disclosure are useful for the delivery of nucleic acids to cells in vitro, ex vivo, and in vivo. In particular, the virus vectors can be advantageously employed to deliver or transfer nucleic acids to animal, including mammalian, cells. Thus, in some embodiments, a nucleic acid (“cargo nucleic acid”) may be encapsidated by a capsid protein of the disclosure.

[0159] In some embodiments, the disclosure provides an AAV vector comprising a recombinant capsid protein with at least 90%, at least 95%, at least 96%, at least 97%, at least 98%, at least 99%, or 100% sequence identity, with any one of SEQ ID NO: 18-80, 300-410, 422-612, or 783-785. In some embodiments, an AAV vector comprises a recombinant capsid protein with at least 90%, at least 95%, at least 96%, at least 97%, at least 98%, at least 99%, or 100% sequence identity, with SEQ ID NO: 380 or 384. In some embodiments, an AAV viral vector comprises a recombinant capsid protein with at least 90%, at least 95%, at least 96%, at least 97%, at least 98%, at least 99%, or 100% sequence identity, with any one of SEQ ID NO: 18-80, 300-410, 422-612, or 783-785 and further comprises a cargo nucleic acid encapsidated by the capsid protein. In some embodiments, an AAV viral vector comprises a recombinant capsid protein with at least 90%, at least 95%, at least 96%, at least 97%, at least 98%, at least 99%, or 100% sequence identity, with SEQ ID NO: 380 or 384 and further comprises a cargo nucleic acid encapsidated by the capsid protein.

[0160] The cargo nucleic acid sequence delivered in the virus vectors of the present disclosure may be any heterologous nucleic acid sequence(s) of interest. Nucleic acids of interest include nucleic acids encoding polypeptides, including therapeutic (e.g., for medical or veterinary uses) or immunogenic (e.g., for vaccines) polypeptides or RNAs.

[0161] Therapeutic polypeptides include, but are not limited to, cystic fibrosis transmembrane regulator protein (CFTR), dystrophin (including mini- and micro-dystrophins, see, e.g., Vincent et al, (1993) Nature Genetics 5: 130; U.S. Patent Publication No. 2003/017131; International publication WO/2008/088895, Wang et al., Proc. Natl. Acad. Sci. USA 97: 1 3714-13719 (2000); and Gregorevic et al., Mol. Ther. 16:657-64 (2008)), myostatin propeptide, follistatin, activin type 11 soluble receptor, IGF-1, apolipoproteins such as apoA (apoA1, apoA2, apoA4, apoA-V), apoB (apoB100, ApoB48), apoC (apoCI, apoCII, apoCIII, apoCIV), apoD, apoE, apoH, apoL, apo(a), anti-inflammatory polypeptides such as the Ikappa B dominant mutant, sarcospan, utrophin (Tinsley et al, (1996) Nature 384:349), mini-utrophin, clotting factors (e.g., Factor VIII, Factor IX, Factor X, etc.), erythropoietin, angiostatin, endostatin, catalase, tyrosine hydroxylase, superoxide dismutase, leptin, the LDL receptor, lipoprotein lipase, progranulin, ornithine transcarbamylase, β-globin, a-globin, spectrin, alpha-1-antitrypsin, adenosine deaminase, hypoxanthine guanine phosphoribosyl transferase, β-glucocerebrosidase, amyloid beta, tau, battenin, sphingomyelinase, lysosomal hexosaminidase A, branched-chain keto acid dehydrogenase, frataxin, RP65 protein, cytokines (e.g., alpha-interferon, beta-interferon, gamma-interferon, interleukin-2, interleukin-4, alpha synuclein, parkin, granulocyte-macrophage colony stimulating factor, lymphotoxin, and the like), peptide growth factors, neurotrophic factors and hormones (e.g., somatotropin, insulin, insulin-like growth factors 1 and 2, platelet derived growth factor, epidermal growth factor, fibroblast growth factor, nerve growth factor, neurotrophic factor-3 and -4, brain-derived neurotrophic factor, bone morphogenic proteins [including RANKL and VEGF], glial derived growth factor, transforming growth factor-α and -β, and the like), huntingtin, lysosomal acid alpha-glucosidase, iduronate-2-sulfatase, N-sulfoglucosamine sulfohydrolase, alpha-galactosidase A, receptors (e.g., the tumor necrosis growth factor soluble receptor), S100A1, ubiquitin protein ligase E3, parvalbumin, adenylyl cyclase type 6, a molecule that modulates calcium handling (e.g., SERCA_{2A}, Inhibitor 1 of PP1 and fragments thereof [e.g., WO 2006/029319 and WO 2007/100465]), a molecule that effects G-protein coupled receptor kinase type 2 knockdown such as a truncated constitutively active bARKct, anti-inflammatory factors such as IRAP, anti-myostatin proteins, aspartoacylase, monoclonal antibodies (including single chain monoclonal antibodies; an exemplary Mab is the Herceptin® Mab), neuropeptides and fragments thereof (e.g., galanin, Neuropeptide Y (see, U.S. Pat. No. 7,071,172), angiogenesis inhibitors such as Vasohibins and other VEGF inhibitors (e.g., Vasohibin 2 [see, WO JP2006/073052]). Other illustrative heterologous nucleic acid sequences encode suicide gene products (e.g., thymidine kinase, cytosine deaminase, diphtheria toxin, and tumor necrosis factor), proteins that enhance or inhibit transcription of host factors (e.g., nuclease-dead Cas9 linked to a transcription enhancer or inhibitor element, zinc-finger proteins linked to a transcription enhancer or inhibitor element, transcription activator-like (TAL) effectors linked to a transcription enhancer or inhibitor element), proteins conferring resistance to a drug used in cancer therapy, tumor suppressor gene products (e.g., p53, Rb, Wt-1), TRAIL, FAS-ligand, and any other polypeptide that has a therapeutic effect in a subject in need thereof. AAV vectors can also be used to deliver monoclonal antibodies and antibody fragments, for example, an antibody or antibody fragment directed against myostatin (see, e.g., Fang et al., Nature Biotechnology 23:584-590 (2005)). Heterologous nucleic acid sequences encoding polypeptides include those encoding reporter polypeptides (e.g., an enzyme). Reporter polypeptides are known in the art and include, but are not limited to, Green Fluorescent Protein, 3-galactosidase, alkaline phosphatase, luciferase, and chloramphenicol acetyltransferase gene.

[0162] Optionally, the heterologous nucleic acid encodes a secreted polypeptide (e.g., a polypeptide that is a secreted polypeptide in its native state or that has been engineered to be secreted, for example, by operable association with a secretory signal sequence as is known in the art).

[0163] Alternatively, in particular embodiments of this disclosure, the heterologous nucleic acid may encode an antisense nucleic acid, a ribozyme (e.g., as described in U.S. Pat. No. 5,877,022), RNAs that effect spliceosome-mediated/ram-splicing (see, Puttaraju et al, (1999) Nature Biotech. 17:246; U.S. Pat. Nos. 6,013,487; 6,083,702), interfering RNAs (RNAi) including siRNA, shRNA or miRNA that mediate gene silencing (see, Sharp et al, (2000) Science 287:2431), and other non-translated RNAs, such as “guide” RNAs (Gorman et al., (1998) Proc. Nat. Acad. Sci. USA 95:4929; U.S. Pat. No. 5,869,248 to Yuan et al.), and the like. Exemplary untranslated RNAs include RNAi against a multiple drug resistance (MDR) gene product (e.g., to treat and/or prevent tumors and/or for administration to the heart to prevent damage by chemotherapy), RNAi against myostatin (e.g., for Duchenne muscular dystrophy), RNAi against VEGF (e.g., to treat and/or prevent tumors), RNAi against phospholamban (e.g., to treat cardiovascular disease, see, e.g., Andino et al., J. Gene Med. 10: 132-142 (2008) and Li et al., Acta Pharmacol Sin. 26:51-55 (2005)); phospholamban inhibitory or dominant-negative molecules such as phospholamban 516E (e.g., to treat cardiovascular disease, see, e.g., Hoshijima et al. Nat. Med. 8:864-871 (2002)), RNAi to adenosine kinase (e.g., for epilepsy), and RNAi directed against pathogenic organisms and viruses (e.g., hepatitis B and/or C virus, human immunodeficiency virus, CMV, herpes simplex virus, human papilloma virus, etc.).

[0164] Further, a nucleic acid sequence that directs alternative splicing can be delivered. To illustrate, an antisense sequence (or other inhibitory sequence) complementary to the 5′ and/or 3′ splice site of dystrophin exon 51 can be delivered in conjunction with a U1 or U7 small nuclear (sn) RNA promoter to induce skipping of this exon. For example, a DNA sequence comprising a U1 or U7 snRNA promoter located 5′ to the antisense/inhibitory sequence(s) can be packaged and delivered in a modified capsid of the disclosure.

[0165] In some embodiments, a nucleic acid sequence that directs gene editing can be delivered. For example, the nucleic acid may encode a guide RNA. In some embodiments, the guide RNA is a single guide RNA (sgRNA) comprising a crRNA sequence and a tracrRNA sequence. In some embodiments, the nucleic acid may encode a nuclease. In some embodiments, the nuclease is a zinc-finger nuclease, a homing endonuclease, a TALEN (transcription activator-like effector nuclease), a NgAgo (agronaute endonuclease), a SGN (structure-guided endonuclease), a RGN (RNA-guided nuclease), or modified or truncated variants thereof. In some embodiments, the RNA-guided nuclease is a Cas9 nuclease, a Cas12(a) nuclease (Cpf1), a Cas12b nuclease, a Cas12c nuclease, a TrpB-like nuclease, a Cas13a nuclease (C2c2), a Cas13b nuclease, or modified or truncated variants thereof. In some embodiments, the Cas9 nuclease is isolated or derived from S. pyogenes or S. aureus.

[0166] In some embodiments, a nucleic acid sequence that directs gene knockdown can be delivered. For example, the nucleic acid sequence may encode a siRNA, an shRNA, a microRNA, or an antisense nucleic acid.

[0167] The virus vector may also comprise a heterologous nucleic acid that shares homology with and recombines with a locus on a host chromosome. This approach can be utilized, for example, to correct a genetic defect in the host cell.

[0168] The present disclosure also provides virus vectors that express an immunogenic polypeptide, e.g., for vaccination. The nucleic acid may encode any immunogen of interest known in the art including, but not limited to, immunogens from human immunodeficiency virus (HIV), simian immunodeficiency virus (SIV), influenza virus, HIV or SIV gag proteins, tumor antigens, cancer antigens, bacterial antigens, viral antigens, and the like.

[0169] The use of parvoviruses as vaccine vectors is known in the art (see, e.g., Miyamura el al, (1994) Proc. Nat. Acad. Sci USA 91:8507; U.S. Pat. No. 5,916,563 to Young et al, U.S. Pat. No. 5,905,040 to Mazzara et al, U.S. Pat. Nos. 5,882,652, 5,863,541 to Samulski et al). The antigen may be presented in the parvovirus capsid.

[0170] Alternatively, the antigen may be expressed from a heterologous nucleic acid introduced into a recombinant vector genome. Any immunogen of interest as described herein and/or as is known in the art can be provided by the virus vector of the present disclosure.

[0171] An immunogenic polypeptide can be any polypeptide suitable for eliciting an immune response and/or protecting the subject against an infection and/or disease, including, but not limited to, microbial, bacterial, protozoal, parasitic, fungal and/or viral infections and diseases. For example, the immunogenic polypeptide can be an orthomyxovirus immunogen (e.g., an influenza virus immunogen, such as the influenza virus hemagglutinin (HA) surface protein or the influenza virus nucleoprotein, or an equine influenza virus immunogen) or a lentivirus immunogen (e.g., an equine infectious anemia virus immunogen, a Simian Immunodeficiency Virus (SIV) immunogen, or a Human Immunodeficiency Virus (HIV) immunogen, such as the HIV or SIV envelope GP 160 protein, the HIV or SIV matrix/capsid proteins, and the HIV or SIV gag, pol and env genes products). The immunogenic polypeptide can also be an arenavirus immunogen (e.g., Lassa fever virus immunogen, such as the Lassa fever virus nucleocapsid protein and the Lassa fever envelope glycoprotein), a poxvirus immunogen (e.g., a vaccinia virus immunogen, such as the vaccinia LI or L8 gene products), a flavivirus immunogen (e.g., a yellow fever virus immunogen or a Japanese encephalitis virus immunogen), a filovirus immunogen (e.g., an Ebola virus immunogen, or a Marburg virus immunogen, such as NP and GP gene products), a bunyavirus immunogen (e.g., RVFV, CCHF, and/or SFS virus immunogens), or a coronavirus immunogen (e.g., an infectious human coronavirus immunogen, such as the human coronavirus envelope glycoprotein, or a porcine transmissible gastroenteritis virus immunogen, or an avian infectious bronchitis virus immunogen). The immunogenic polypeptide can further be a polio immunogen, a herpes immunogen (e.g., CMV, EBV, HSV immunogens), a mumps immunogen, a measles immunogen, a rubella immunogen, a diphtheria toxin or other diphtheria immunogen, a pertussis antigen, a hepatitis (e.g., hepatitis A, hepatitis B, hepatitis C, etc.) immunogen, and/or any other vaccine immunogen now known in the art or later identified as an immunogen.

[0172] Alternatively, the immunogenic polypeptide can be any tumor or cancer cell antigen. Optionally, the tumor or cancer antigen is expressed on the surface of the cancer cell.

[0173] Exemplary cancer and tumor cell antigens are described in S. A. Rosenberg (Immunity 10:281 (1991)). Other illustrative cancer and tumor antigens include, but are not limited to: BRCA1 gene product, BRCA2 gene product, gp100, tyrosinase, GAGE-1/2, BALE, RAGE, LAGE, NY-ESO-1, CDK-4, β-catenin, MUM-1, Caspase-8, KIAA0205, HPVE, SART-1, FRAME, p15, melanoma tumor antigens (Kawakami et al., (1994) Proc. Natl. Acad. Sci. USA 91:3515; Kawakami et al., (1994) J. Exp. Med., 180:347; Kawakami et al., (1994) Cancer Res. 54:3124), MART-1, gp100, MAGE-1, MAGE-2, MAGE-3, CEA, TRP-1, TRP-2, P-15, tyrosinase (Brichard et al., (1993) J Exp. Med. 178:489); HER-2/neu gene product (U.S. Pat. No. 4,968,603), CA 125, LK26, FB5 (endosialin), TAG 72, AFP, CA 19-9, NSE, DU-PAN-2, CA50, SPan-1, CA72-4, HCG, STN (sialyl Tn antigen), c-erbB-2 proteins, PSA, L-CanAg, estrogen receptor, milk fat globulin, p53 tumor suppressor protein (Levine, (1993) Ann. Rev. Biochem. 62:623); mucin antigens (International Patent Publication No. WO 90/05142); telomerases; nuclear matrix proteins; prostatic acid phosphatase; papilloma virus antigens; and/or antigens now known or later discovered to be associated with the following cancers: melanoma, adenocarcinoma, thymoma, lymphoma (e.g., non-Hodgkin's lymphoma, Hodgkin's lymphoma), sarcoma, lung cancer, liver cancer, colon cancer, leukemia, uterine cancer, breast cancer, prostate cancer, ovarian cancer, cervical cancer, bladder cancer, kidney cancer, pancreatic cancer, brain cancer and any other cancer or malignant condition or metastasis thereof now known or later identified (see, e.g., Rosenberg, (1996) Ann. Rev. Med. 47:481-91).

[0174] As a further alternative, the heterologous nucleic acid can encode any polypeptide that is desirably produced in a cell in vitro, ex vivo, or in vivo. For example, the virus vectors may be introduced into cultured cells and the expressed gene product isolated therefrom.

[0175] It will be understood by those skilled in the art that the heterologous nucleic acid(s) of interest can be operably associated with appropriate control sequences. For example, the heterologous nucleic acid can be operably associated with expression control elements, such as transcription/translation control signals, origins of replication, polyadenylation signals, internal ribosome entry sites (IRES), promoters, and/or enhancers, and the like.

[0176] Further, regulated expression of the heterologous nucleic acid(s) of interest can be achieved at the post-transcriptional level, e.g., by regulating selective splicing of different introns by the presence or absence of an oligonucleotide, small molecule and/or other compound that selectively blocks splicing activity at specific sites (e.g., as described in WO 2006/119137).

[0177] Those skilled in the art will appreciate that a variety of promoter/enhancer elements can be used depending on the level and tissue-specific expression desired. The promoter/enhancer can be constitutive or inducible, depending on the pattern of expression desired. The promoter/enhancer can be native or foreign and can be a natural or a synthetic sequence. By foreign, it is intended that the transcriptional initiation region is not found in the wild-type host into which the transcriptional initiation region is introduced.

[0178] In particular embodiments, the promoter/enhancer elements can be native to the target cell or subject to be treated. In representative embodiments, the promoters/enhancer element can be native to the heterologous nucleic acid sequence. The promoter/enhancer element is generally chosen so that it functions in the target cell(s) of interest. Further, in particular embodiments the promoter/enhancer element is a mammalian promoter/enhancer element. The promoter/enhancer element may be constitutive or inducible.

[0179] Inducible expression control elements are typically advantageous in those applications in which it is desirable to provide regulation over expression of the heterologous nucleic acid sequence(s). Inducible promoters/enhancer elements for gene delivery can be tissue-specific or -preferred promoter/enhancer elements, and include muscle specific or preferred (including cardiac, skeletal and/or smooth muscle specific or preferred), neural tissue specific or preferred (including brain-specific or preferred), eye specific or preferred (including retina-specific and cornea-specific), liver specific or preferred, bone marrow specific or preferred, pancreatic specific or preferred, spleen specific or preferred, and lung specific or preferred promoter/enhancer elements. Other inducible promoter/enhancer elements include hormone-inducible and metal-inducible elements. Exemplary inducible promoters/enhancer elements include, but are not limited to, a Tet on/off element, a RU486-inducible promoter, an ecdysone-inducible promoter, a rapamycin-inducible promoter, and a metallothionein promoter.

[0180] In embodiments wherein the heterologous nucleic acid sequence(s) is transcribed and then translated in the target cells, specific initiation signals are generally included for efficient translation of inserted protein coding sequences. These exogenous translational control sequences, which may include the ATG initiation codon and adjacent sequences, can be of a variety of origins, both natural and synthetic.

[0181] The virus vectors according to the present disclosure provide a means for delivering heterologous nucleic acids into a broad range of cells, including dividing and non-dividing cells. The virus vectors can be employed to deliver a nucleic acid of interest to a cell in vitro, e.g., to produce a polypeptide in vitro or for ex vivo gene therapy. The virus vectors are additionally useful in a method of delivering a nucleic acid to a subject in need thereof e.g., to express an immunogenic or therapeutic polypeptide or a functional RNA. In this manner, the polypeptide or functional RNA can be produced in vivo in the subject. The subject can be in need of the polypeptide because the subject has a deficiency of the polypeptide. Further, the method can be practiced because the production of the polypeptide or functional RNA in the subject may impart some beneficial effect.

[0182] The virus vectors can also be used to produce a polypeptide of interest or functional RNA in cultured cells or in a subject (e.g., using the subject as a bioreactor to produce the polypeptide or to observe the effects of the functional RNA on the subject, for example, in connection with screening methods).

[0183] In general, the virus vectors of the present disclosure can be employed to deliver a heterologous nucleic acid encoding a polypeptide or functional RNA to treat and/or prevent any disease state for which it is beneficial to deliver a therapeutic polypeptide or functional RNA. Illustrative disease states include, but are not limited to: cystic fibrosis (cystic fibrosis transmembrane regulator protein) and other diseases of the lung, hemophilia A (Factor VIII), hemophilia B (Factor IX), thalassemia (β-globin), anemia (erythropoietin) and other blood disorders. Alzheimer's disease (GDF; neprilysin), multiple sclerosis (β-interferon), Parkinson's disease (glial-cell line derived neurotrophic factor [GDNF]), Huntington's disease (RNAi to remove repeats), Canavan's disease, amyotrophic lateral sclerosis, epilepsy (galanin, neurotrophic factors), and other neurological disorders, cancer (endostatin, angiostatin, TRAIL, FAS-ligand, cytokines including interferons; RNAi including RNAi against VEGF or the multiple drug resistance gene product, mir-26a [e.g., for hepatocellular carcinoma]), diabetes mellitus (insulin), muscular dystrophies including Duchenne (dystrophin, mini-dystrophin, insulin-like growth factor I, a sarcoglycan [e.g., a, β, γ], RNAi against myostatic myostatin propeptide, follistatin, activin type II soluble receptor, anti-inflammatory polypeptides such as the Ikappa B dominant mutant, sarcospan, utrophin, mini-utrophin, antisense or RNAi against splice junctions in the dystrophin gene to induce exon skipping [see, e.g., WO/2003/095647], antisense against U7 snRNAs to induce exon skipping [see, e.g., WO/2006/021724], and antibodies or antibody fragments against myostatin or myostatin propeptide) and Becker, Gaucher disease (glucocerebrosidase), Hurler's disease (a-L-iduronidase), adenosine deaminase deficiency (adenosine deaminase), glycogen storage diseases (e.g., Fabry disease [a-galactosidase] and Pompe disease [lysosomal acid alpha-glucosidase]) and other metabolic disorders, congenital emphysema (alpha-1-antitrypsin), Lesch-Nyhan Syndrome (hypoxan thine guanine phosphoribosyl transferase), Niemann-Pick disease (sphingomyelinase), Tay-Sachs disease (lysosomal hexosaminidase A), Maple Syrup Urine Disease (branched-chain keto acid dehydrogenase), retinal degenerative diseases (and other diseases of the eye and retina; e.g., PDGF for macular degeneration and/or vasohibin or other inhibitors of VEGF or other angiogenesis inhibitors to treat/prevent retinal disorders, e.g., in Type I diabetes), diseases of solid organs such as brain (including Parkinson's Disease [GDNF], astrocytomas [endostatin, angiostatin and/or RNAi against VEGF], glioblastomas [endostatin, angiostatin and/or RNAi against VEGF]), liver, kidney, heart including congestive heart failure or peripheral artery disease (PAD) (e.g., by delivering protein phosphatase inhibitor I (I-1) and fragments thereof (e.g., IIC), serca2a, zinc finger proteins that regulate the phospholamban gene, Barkct, [32-adrenergic receptor, 2-adrenergic receptor kinase (BARK), phosphoinositide-3 kinase (PI3 kinase), S100A1, parvalbumin, adenylyl cyclase type 6, a molecule that effects G-protein coupled receptor kinase type 2 knockdown such as a truncated constitutively active bARKct; calsarcin, RNAi against phospholamban; phospholamban inhibitory or dominant-negative molecules such as phospholamban S16E, etc.), arthritis (insulin-like growth factors), joint disorders (insulin-like growth factor 1 and/or 2), intimal hyperplasia (e.g., by delivering enos, inos), improve survival of heart transplants (superoxide dismutase), AIDS (soluble CD4), muscle wasting (insulin-like growth factor 1), kidney deficiency (erythropoietin), anemia (erythropoietin), arthritis (anti-inflammatory factors such as I RAP and TNFa soluble receptor), hepatitis (a-interferon), LDL receptor deficiency (LDL receptor), hyperammonemia (ornithine transcarbamylase), Krabbe's disease (galactocerebrosidase), Batten's disease, spinal cerebral ataxias including SCA1, SCA2 and SCA3, phenylketonuria (phenylalanine hydroxylase), autoimmune diseases, and the like. The disclosure can further be used following organ transplantation to increase the success of the transplant and/or to reduce the negative side effects of organ transplantation or adjunct therapies (e.g., by administering immunosuppressant agents or inhibitory nucleic acids to block cytokine production). As another example, bone morphogenic proteins (including BNP 2, 7, etc., RANKL and/or VEGF) can be administered with a bone allograft, for example, following a break or surgical removal in a cancer patient.

[0184] In some embodiments, the virus vectors of the present disclosure can be employed to deliver a heterologous nucleic acid encoding a polypeptide or functional RNA to treat and/or prevent a liver disease or disorder. The liver disease or disorder may be, for example, primary biliary cirrhosis, nonalcoholic fatty liver disease (NAFLD), non-alcoholic steatohepatitis (NASH), autoimmune hepatitis, hepatitis B, hepatitis C, alcoholic liver disease, fibrosis, jaundice, primary sclerosing cholangitis (PSC), Budd-Chiari syndrome, hemochromatosis, Wilson's disease, alcoholic fibrosis, non-alcoholic fibrosis, liver steatosis, Gilbert's syndrome, biliary atresia, alpha-1-antitrypsin deficiency, alagille syndrome, progressive familial intrahepatic cholestasis, Hemophilia B, Hereditary Angioedema (HAE), Homozygous Familial Hypercholesterolemia (HoFH), Heterozygous Familial Hypercholesterolemia (HeFH), Von Gierke's Disease (GSD I), Hemophilia A, Methylmalonic Acidemia, Propionic Acidemia, Homocystinuria, Phenylketonuria (PKU), Tyrosinemia Type 1, Arginase 1 Deficiency, Argininosuccinate Lyase Deficiency, Carbamoyl-phosphate synthetase 1 deficiency, Citrullinemia Type 1, Citrin Deficiency, Crigler-Najjar Syndrome Type 1, Cystinosis, Fabry Disease, Glycogen Storage Disease 1b, LPL Deficiency, N-Acetylglutamate Synthetase Deficiency, Ornithine Transcarbamylase Deficiency, Ornithine Translocase Deficiency, Primary Hyperoxaluria Type 1, or ADA SCID.

[0185] The disclosure can also be used to produce induced pluripotent stem cells (iPS). For example, a virus vector of the disclosure can be used to deliver stem cell associated nucleic acid(s) into a non-pluripotent cell, such as adult fibroblasts, skin cells, liver cells, renal cells, adipose cells, cardiac cells, neural cells, epithelial cells, endothelial cells, and the like.

[0186] Nucleic acids encoding factors associated with stem cells are known in the art. Nonlimiting examples of such factors associated with stem cells and pluripotency include Oct-3/4, the SOX family (e.g., SOX 1, SOX2, SOX3 and/or SOX 15), the Klf family (e.g., KlfI, KHZ Klf4 and/or Klf5), the Myc family (e.g., C-myc, L-myc and/or N-myc), NANOG and/or LIN28.

[0187] The disclosure can also be practiced to treat and/or prevent a metabolic disorder such as diabetes (e.g., insulin), hemophilia (e.g., Factor IX or Factor VIII), a lysosomal storage disorder such as a mucopolysaccharidosis disorder (e.g., Sly syndrome [β-glucuronidase], Hurler Syndrome [alpha-L-iduronidase], Scheie Syndrome [alpha-L-iduronidase], Hurler-Scheie Syndrome [alpha-L-iduronidase], Hunter's Syndrome [iduronate sulfatase], Sanfilippo Syndrome A [heparan sulfamidase], B [N-acetylglucosaminidase], C [acetyl-CoA:alpha-glucosaminide acetyltransferase], D [N-acetylglucosamine 6-sulfatase], Morquio Syndrome A [galactoses-sulfate sulfatase], B [β-galactosidase], Maroteaux-Lamy Syndrome [N-acetylgalactosamine-4-sulfatase], etc.), Fabry disease (alpha-galactosidase), Gaucher's disease (glucocerebrosidase), or a glycogen storage disorder (e.g., Pompe disease; lysosomal acid alpha-glucosidase).

[0188] Gene transfer has substantial use for understanding and providing therapy for disease states. There are a number of inherited diseases in which defective genes are known and have been cloned. In general, the above disease states fall into two classes: deficiency states, usually of enzymes, which are generally inherited in a recessive manner, and unbalanced states, which may involve regulatory or structural proteins, and which are typically inherited in a dominant manner. For deficiency state diseases, gene transfer can be used to bring a normal gene into affected tissues for replacement therapy, as well as to create animal models for the disease using antisense mutations. For unbalanced disease states, gene transfer can be used to create a disease state in a model system, which can then be used in efforts to counteract the disease state. Thus, virus vectors according to the present disclosure permit the treatment and/or prevention of genetic diseases.

[0189] The virus vectors according to the present disclosure may also be employed to provide a functional RNA to a cell in vitro or in vivo. The functional RNA may be, for example, a non-coding RNA. In some embodiments, expression of the functional RNA in the cell can diminish expression of a particular target protein by the cell. Accordingly, functional RNA can be administered to decrease expression of a particular protein in a subject in need thereof. In some embodiments, expression of the functional RNA in the cell can increase expression of a particular target protein by the cell. Accordingly, functional RNA can be administered to increase expression of a particular protein in a subject in need thereof. In some embodiments, expression of the functional RNA can regulate splicing of a particular target RNA in a cell. Accordingly, functional RNA can be administered to regulate splicing of a particular RNA in a subject in need thereof. In some embodiments, expression of the functional RNA in the cell can regulate the function of a particular target protein by the cell. Accordingly, functional RNA can be administered to regulate the function of a particular protein in a subject in need thereof. Functional RNA can also be administered to cells in vitro to regulate gene expression and/or cell physiology, e.g., to optimize cell or tissue culture systems or in screening methods.

[0190] In addition, virus vectors according to the instant disclosure find use in diagnostic and screening methods, whereby a nucleic acid of interest is transiently or stably expressed in a cell culture system, or alternatively, a transgenic animal model.

[0191] The virus vectors of the present disclosure can also be used for various non-therapeutic purposes, including but not limited to use in protocols to assess gene targeting, clearance, transcription, translation, etc., as would be apparent to one skilled in the art. The virus vectors can also be used for the purpose of evaluating safety (spread, toxicity, immunogenicity, etc.). Such data, for example, are considered by the United States Food and Drug Administration as part of the regulatory approval process prior to evaluation of clinical efficacy.

[0192] As a further aspect, the virus vectors of the present disclosure may be used to produce an immune response in a subject. According to this embodiment, a virus vector comprising a heterologous nucleic acid sequence encoding an immunogenic polypeptide can be administered to a subject, and an active immune response is mounted by the subject against the immunogenic polypeptide. Immunogenic polypeptides are as described hereinabove. In some embodiments, a protective immune response is elicited.

[0193] Alternatively, the virus vector may be administered to a cell ex vivo and the altered cell is administered to the subject. The virus vector comprising the heterologous nucleic acid is introduced into the cell, and the cell is administered to the subject, where the heterologous nucleic acid encoding the immunogen can be expressed and induce an immune response in the subject against the immunogen. In particular embodiments, the cell is an antigen-presenting cell (e.g., a dendritic cell).

[0194] An “active immune response” or “active immunity” is characterized by “participation of host tissues and cells after an encounter with the immunogen. It involves differentiation and proliferation of immunocompetent cells in lymphoreticular tissues, which lead to synthesis of antibody or the development of cell-mediated reactivity, or both.” Herbert B. Herscowitz, Immunophysiology: Cell Function and Cellular Interactions in Antibody Formation, in IMMUNOLOGY: BASIC PROCESSES 1 17 (Joseph A. Bellanti ed., 1985). Alternatively stated, an active immune response is mounted by the host after exposure to an immunogen by infection or by vaccination. Active immunity can be contrasted with passive immunity, which is acquired through the transfer of preformed substances (antibody, transfer factor, thymic graft, interleukin-2) from an actively immunized host to a non-immune host.

[0195] A “protective” immune response or “protective” immunity as used herein indicates that the immune response confers some benefit to the subject in that it prevents or reduces the incidence of disease. Alternatively, a protective immune response or protective immunity may be useful in the treatment and/or prevention of disease, in particular cancer or tumors (e.g., by preventing cancer or tumor formation, by causing regression of a cancer or tumor and/or by preventing metastasis and/or by preventing growth of metastatic nodules). The protective effects may be complete or partial, as long as the benefits of the treatment outweigh any disadvantages thereof.

[0196] In particular embodiments, the virus vector or cell comprising the heterologous nucleic acid can be administered in an immunogenically effective amount, as described below.

[0197] The virus vectors of the present disclosure can also be administered for cancer immunotherapy by administration of a virus vector expressing one or more cancer cell antigens (or an immunologically similar molecule) or any other immunogen that produces an immune response against a cancer cell. To illustrate, an immune response can be produced against a cancer cell antigen in a subject by administering a virus vector comprising a heterologous nucleic acid encoding the cancer cell antigen, for example to treat a patient with cancer and/or to prevent cancer from developing in the subject. The virus vector may be administered to a subject in vivo or by using ex vivo methods, as described herein.

[0198] Alternatively, the cancer antigen can be expressed as part of the virus capsid or be otherwise associated with the virus capsid (e.g., as described above).

[0199] As another alternative, any other therapeutic nucleic acid (e.g., RNAi) or polypeptide (e.g., cytokine) known in the art can be administered to treat and/or prevent cancer.

[0200] As used herein, the term “cancer” encompasses tumor-forming cancers. Likewise, the term “cancerous tissue” encompasses tumors. A “cancer cell antigen” encompasses tumor antigens.

[0201] The term “cancer” has its understood meaning in the art, for example, an uncontrolled growth of tissue that has the potential to spread to distant sites of the body (i.e., metastasize). Exemplary cancers include, but are not limited to melanoma, adenocarcinoma, thymoma, lymphoma (e.g., non-Hodgkin's lymphoma, Hodgkin's lymphoma), sarcoma, lung cancer, liver cancer, colon cancer, leukemia, uterine cancer, breast cancer, prostate cancer, ovarian cancer, cervical cancer, bladder cancer, kidney cancer, pancreatic cancer, brain cancer and any other cancer or malignant condition now known or later identified. In representative embodiments, the disclosure provides a method of treating and/or preventing tumor-forming cancers.

[0202] The term “tumor” is also understood in the art, for example, as an abnormal mass of undifferentiated cells within a multicellular organism. Tumors can be malignant or benign. In representative embodiments, the methods disclosed herein are used to prevent and treat malignant tumors.

[0203] By the terms “treating cancer,” “treatment of cancer” and equivalent terms it is intended that the severity of the cancer is reduced or at least partially eliminated and/or the progression of the disease is slowed and/or controlled and/or the disease is stabilized. In particular embodiments, these terms indicate that metastasis of the cancer is prevented or reduced or at least partially eliminated and/or that growth of metastatic nodules is prevented or reduced or at least partially eliminated.

[0204] By the terms “prevention of cancer” or “preventing cancer” and equivalent terms it is intended that the methods at least partially eliminate or reduce and/or delay the incidence and/or severity of the onset of cancer. Alternatively stated, the onset of cancer in the subject may be reduced in likelihood or probability and/or delayed.

[0205] In particular embodiments, cells may be removed from a subject with cancer and contacted with a virus vector expressing a cancer cell antigen according to the instant disclosure. The modified cell is then administered to the subject, whereby an immune response against the cancer cell antigen is elicited. This method can be advantageously employed with immunocompromised subjects that cannot mount a sufficient immune response in vivo (i.e., cannot produce enhancing antibodies in sufficient quantities).

[0206] It is known in the art that immune responses may be enhanced by immunomodulatory cytokines (e.g., alpha-interferon, beta-interferon, gamma-interferon, omega-interferon, tau-interferon, interleukin-1-alpha, interleukin-1β, interleukin-2, interleukin-3, interleukin-4, interleukin 5, interleukin-6, interleukin-7, interleukin-8, interleukin-9, interleukin-10, interleukin-11, interleukin-12, interleukin-13, interleukin-14, interleukin-18, B cell Growth factor, CD40 Ligand, tumor necrosis factor-alpha, tumor necrosis factor-β, monocyte chemoattractant protein-1, granulocyte-macrophage colony stimulating factor, and lymphotoxin). Accordingly, immunomodulatory cytokines (preferably, CTL inductive cytokines) may be administered to a subject in conjunction with the virus vector. Cytokines may be administered by any method known in the art. Exogenous cytokines may be administered to the subject, or alternatively, a nucleic acid encoding a cytokine may be delivered to the subject using a suitable vector, and the cytokine produced in vivo.

### Subjects, Pharmaceutical Formulations, and Modes of Administration

[0207] Virus vectors and capsids according to the present disclosure find use in both veterinary and medical applications. Suitable subjects include both avians and mammals. The term “avian” as used herein includes, but is not limited to, chickens, ducks, geese, quail, turkeys, pheasant, parrots, parakeets, and the like. The term “mammals” as used herein includes, but is not limited to, humans, non-human primates, bovines, ovines, caprines, equines, felines, canines, lagomorphs, etc. Human subjects include neonates, infants, juveniles, adults and geriatric subjects. In some embodiments, a human subject can be less than 6 months old, less than 2 years old, less than 5 years old, less than 10 years old, 10-18 years old, 19-29 years old, 30-35 years old, 36-40 years old, or older than 40 years old.

[0208] In representative embodiments, the subject is “in need” of the methods described herein.

[0209] In particular embodiments, a pharmaceutical composition is provided comprising a virus vector and/or capsid and/or capsid protein and/or virus particle of the disclosure in a pharmaceutically acceptable carrier and, optionally, other medicinal agents, pharmaceutical agents, stabilizing agents, buffers, carriers, adjuvants, diluents, etc. For injection, the carrier will typically be a liquid. For other methods of administration, the carrier may be either solid or liquid. For inhalation administration, the carrier will be respirable, and optionally can be in solid or liquid particulate form.

[0210] By “pharmaceutically acceptable” it is meant a material that is not toxic or otherwise undesirable, i.e., the material may be administered to a subject without causing any undesirable biological effects.

[0211] One aspect of the present disclosure is a method of transferring a nucleic acid to a cell in vitro. The virus vector may be introduced into the cells at the appropriate multiplicity of infection according to standard transduction methods suitable for the particular target cells. Titers of virus vector to administer can vary, depending upon the target cell type and number, and the particular virus vector, and can be determined by those of skill in the art without undue experimentation. In representative embodiments, at least about 10³ infectious units, optionally at least about 10⁵ infectious units are introduced to the cell.

[0212] The cell(s) into which the virus vector is introduced can be of any type, including but not limited to neural cells (including cells of the peripheral and central nervous systems, in particular, brain cells such as neurons and oligodendricytes), lung cells, cells of the eye (including retinal cells, retinal pigment epithelium, and corneal cells), epithelial cells (e.g., gut and respiratory epithelial cells), muscle cells (e.g., skeletal muscle cells, cardiac muscle cells, smooth muscle cells and/or diaphragm muscle cells), dendritic cells, pancreatic cells (including islet cells), hepatic cells, myocardial cells, bone cells (e.g., bone marrow stem cells), hematopoietic stem cells, spleen cells, keratinocytes, fibroblasts, endothelial cells, prostate cells, germ cells, and the like. In representative embodiments, the cell can be any progenitor cell. As a further possibility, the cell can be a stem cell (e.g., neural stem cell, liver stem cell). As still a further alternative, the cell can be a cancer or tumor cell. Moreover, the cell can be from any species of origin, as indicated above.

[0213] The virus vector can be introduced into cells in vitro for the purpose of administering the modified cell to a subject. In particular embodiments, the cells have been removed from a subject, the virus vector is introduced therein, and the cells are then administered back into the subject. Methods of removing cells from subject for manipulation ex vivo, followed by introduction back into the subject are known in the art (see, e.g., U.S. Pat. No. 5,399,346). Alternatively, the recombinant virus vector can be introduced into cells from a donor subject, into cultured cells, or into cells from any other suitable source, and the cells are administered to a subject in need thereof (i.e., a “recipient” subject).

[0214] Suitable cells for ex vivo nucleic acid delivery are as described above. Dosages of the cells to administer to a subject will vary upon the age, condition and species of the subject, the type of cell, the nucleic acid being expressed by the cell, the mode of administration, and the like. Typically, at least about 10² to about 10⁸ cells or at least about 10³ to about 10⁶ cells will be administered per dose in a pharmaceutically acceptable carrier. In particular embodiments, the cells transduced with the virus vector are administered to the subject in a therapeutically effective amount in combination with a pharmaceutical carrier.

[0215] In some embodiments, the virus vector is introduced into a cell and the cell can be administered to a subject to elicit an immunogenic response against the delivered polypeptide (e.g., expressed as a transgene or in the capsid). Typically, a quantity of cells expressing an immunogenically effective amount of the polypeptide in combination with a pharmaceutically acceptable carrier is administered. An “immunogenically effective amount” is an amount of the expressed polypeptide that is sufficient to evoke an active immune response against the polypeptide in the subject to which the pharmaceutical formulation is administered. In particular embodiments, the dosage is sufficient to produce a protective immune response (as defined above). The degree of protection conferred need not be complete or permanent, as long as the benefits of administering the immunogenic polypeptide outweigh any disadvantages thereof.

[0216] Thus, the present disclosure provides a method of administering a nucleic acid to a cell, the method comprising contacting the cell with the virus vector, virus particle and/or composition of this disclosure.

[0217] A further aspect of the disclosure is a method of administering the virus vector, virus particle and/or virus capsid of this disclosure to a subject. Thus, the present disclosure also provides a method of delivering a nucleic acid to a subject, comprising administering to the subject a virus particle, virus vector and/or composition of this disclosure. Administration of the virus vectors, virus particles and/or capsids according to the present disclosure to a human subject or an animal in need thereof can be by any means known in the art. Optionally, the virus vector, virus particle and/or capsid is delivered in a therapeutically effective dose in a pharmaceutically acceptable carrier. In preferred embodiments, a therapeutically effective amount of the virus vector, virus particle and/or capsid is delivered.

[0218] The virus vectors and/or capsids of the disclosure can further be administered to elicit an immunogenic response (e.g., as a vaccine). Typically, immunogenic compositions of the present disclosure comprise an immunogenically effective amount of virus vector and/or capsid in combination with a pharmaceutically acceptable carrier. Optionally, the dosage is sufficient to produce a protective immune response (as defined above). The degree of protection conferred need not be complete or permanent, as long as the benefits of administering the immunogenic polypeptide outweigh any disadvantages thereof. Subjects and immunogens are as described above.

[0219] Dosages of the virus vector and/or capsid to be administered to a subject depend upon the mode of administration, the disease or condition to be treated and/or prevented, the individual subject's condition, the particular virus vector or capsid, and the nucleic acid to be delivered, and the like, and can be determined in a routine manner. Exemplary doses for achieving therapeutic effects are titers of at least about 10⁵, about 10⁶, about 10⁷, about 10⁸, about 10⁹, about 10¹⁰, about 10¹¹, about 10¹², about 10¹³, about 10¹⁴, about 10¹⁵ transducing units, optionally about 10⁸-10¹³ transducing units.

[0220] In particular embodiments, more than one administration (e.g., two, three, four or more administrations) may be employed to achieve the desired level of gene expression over a period of various intervals, e.g., daily, weekly, monthly, yearly, etc.

[0221] Exemplary modes of administration include oral, rectal, transmucosal, intranasal, inhalation (e.g., via an aerosol), buccal (e.g., sublingual), vaginal, intrathecal, intraocular, transdermal, in utero (or in ovo), parenteral (e.g., intravenous, subcutaneous, intradermal, intramuscular [including administration to skeletal, diaphragm and/or cardiac muscle], intradermal, intrapleural, intracerebral, and intraarticular), topical (e.g., to both skin and mucosal surfaces, including airway surfaces, and transdermal administration), intralymphatic, and the like, as well as direct tissue or organ injection (e.g., to liver, skeletal muscle, cardiac muscle, diaphragm muscle or brain). Administration can also be to a tumor (e.g., in or near a tumor or a lymph node). The most suitable route in any given case will depend on the nature and severity of the condition being treated and/or prevented and on the nature of the particular vector that is being used.

[0222] Administration to skeletal muscle according to the present disclosure includes but is not limited to administration to skeletal muscle in the limbs (e.g., upper arm, lower arm, upper leg, and/or lower leg), back, neck, head (e.g., tongue), thorax, abdomen, pelvis/perineum, and/or digits. Suitable skeletal muscles include but are not limited to abductor digiti minimi (in the hand), abductor digiti minimi (in the foot), abductor hallucis, abductor ossis metatarsi quinti, abductor pollicis brevis, abductor pollicis longus, adductor brevis, adductor hallucis, adductor longus, adductor magnus, adductor pollicis, anconeus, anterior scalene, articularis genus, biceps brachii, biceps femoris, brachialis, brachioradialis, buccinator, coracobrachialis, corrugator supercilii, deltoid, depressor anguli oris, depressor labii inferioris, digastric, dorsal interossei (in the hand), dorsal interossei (in the foot), extensor carpi radialis brevis, extensor carpi radialis longus, extensor carpi ulnaris, extensor digiti minimi, extensor digitorum, extensor digitorum brevis, extensor digitorum longus, extensor hallucis brevis, extensor hallucis longus, extensor indicis, extensor pollicis brevis, extensor pollicis longus, flexor carpi radialis, flexor carpi ulnaris, flexor digiti minimi brevis (in the hand), flexor digiti minimi brevis (in the foot), flexor digitorum brevis, flexor digitorum longus, flexor digitorum profundus, flexor digitorum superficial is, flexor hallucis brevis, flexor hallucis longus, flexor pollicis brevis. flexor pollicis longus, frontalis, gastrocnemius, geniohyoid, gluteus maximus, gluteus medius, gluteus minimus, gracilis, iliocostalis cervicis, iliocostalis lumborum, iliocostalis thoracis, illiacus, inferior gemellus, inferior oblique, inferior rectus, infraspinatus, interspinalis, intertransversi, lateral pterygoid, lateral rectus, latissimus dorsi, levator anguli oris, levator labii superioris, levator labii superioris alaeque nasi, levator palpebrae superioris, levator scapulae, long rotators, longissimus capitis, longissimus cervicis, longissimus thoracis, longus capitis, longus colli, lumbricals (in the hand), lumbricals (in the foot), masseter, medial pterygoid, medial rectus, middle scalene, multifidus, mylohyoid, obliquus capitis inferior, obliquus capitis superior, obturator externus, obturator internus, occipitalis, omohyoid, opponens digiti minimi, opponens pollicis, orbicularis oculi, orbicularis oris, palmar interossei, palmaris brevis, palmaris longus, pectineus, pectoralis major, pectoralis minor, peroneus brevis, peroneus longus, peroneus tertius, piriformis, plantar interossei, plantaris, platysma, popliteus, posterior scalene, pronator quadratus, pronator teres, psoas major, quadratus femoris, quadratus plantae, rectus capitis anterior, rectus capitis lateralis, rectus capitis posterior major, rectus capitis posterior minor, rectus femoris, rhomboid major, rhomboid minor, risorius, sartorius, scalenus minimus, semimembranosus, semispinalis capitis, semispinalis cervicis, semispinalis thoracis, semitendinosus, serratus anterior, short rotators, soleus, spinalis capitis, spinalis cervicis, spinalis thoracis, splenius capitis, splenius cervicis, sternocleidomastoid, sternohyoid, sternothyroid, stylohyoid, subclavius, subscapularis, superior gemellus, superior oblique, superior rectus, supinator, supraspinatus, temporalis, tensor fascia lata, teres major, teres minor, thoracis, thyrohyoid, tibialis anterior, tibialis posterior, trapezius, triceps brachii, vastus intermedius, vastus lateralis, vastus medialis, zygomaticus major, and zygomaticus minor, and any other suitable skeletal muscle as known in the art.

[0223] The virus vector and/or capsid can be delivered to skeletal muscle by intravenous administration, intra-arterial administration, intraperitoneal administration, limb perfusion, (optionally, isolated limb perfusion of a leg and/or arm; see, e.g. Arruda et al., (2005) Blood 105: 3458-3464), and/or direct intramuscular injection. In particular embodiments, the virus vector and/or capsid is administered to a limb (arm and/or leg) of a subject (e.g., a subject with muscular dystrophy such as DMD) by limb perfusion, optionally isolated limb perfusion (e.g., by intravenous or intra-articular administration). In embodiments of the disclosure, the virus vectors and/or capsids of the disclosure can advantageously be administered without employing “hydrodynamic” techniques. Tissue delivery (e.g., to muscle) of prior art vectors is often enhanced by hydrodynamic techniques (e.g., intravenous/intravenous administration in a large volume), which increase pressure in the vasculature and facilitate the ability of the vector to cross the endothelial cell barrier. In particular embodiments, the viral vectors and/or capsids of the disclosure can be administered in the absence of hydrodynamic techniques such as high volume infusions and/or elevated intravascular pressure (e.g., greater than normal systolic pressure, for example, less than or equal to 5%, 10%, 15%, 20%, 25% increase in intravascular pressure over normal systolic pressure). Such methods may reduce or avoid the side effects associated with hydrodynamic techniques such as edema, nerve damage and/or compartment syndrome. Administration to cardiac muscle includes administration to the left atrium, right atrium, left ventricle, right ventricle and/or septum. The virus vector and/or capsid can be delivered to cardiac muscle by intravenous administration, intra-arterial administration such as intra-aortic administration, direct cardiac injection (e.g., into left atrium, right atrium, left ventricle, right ventricle), and/or coronary artery perfusion.

[0224] Administration to diaphragm muscle can be by any suitable method including intravenous administration, intra-arterial administration, and/or intra-peritoneal administration.

[0225] Delivery to a target tissue can also be achieved by delivering a depot comprising the virus vector and/or capsid. In representative embodiments, a depot comprising the virus vector and/or capsid is implanted into skeletal, cardiac and/or diaphragm muscle tissue or the tissue can be contacted with a film or other matrix comprising the virus vector and/or capsid. Such implantable matrices or substrates are described in U.S. Pat. No. 7,201,898.

[0226] In particular embodiments, a virus vector and/or virus capsid according to the present disclosure is administered to skeletal muscle, diaphragm muscle and/or cardiac muscle (e.g., to treat and/or prevent muscular dystrophy, heart disease [for example, PAD or congestive heart failure]).

[0227] In representative embodiments, the disclosure is used to treat and/or prevent disorders of skeletal, cardiac and/or diaphragm muscle.

[0228] In a representative embodiment, a method of treating and/or preventing muscular dystrophy in a subject in need thereof is provided, the method comprising:

[0229] administering a treatment or prevention effective amount of a virus vector of the disclosure to a mammalian subject, wherein the virus vector comprises a heterologous nucleic acid encoding dystrophin, a mini-dystrophin, a micro-dystrophin, myostatin propeptide, follistatin, activin type II soluble receptor, IGF-1, anti-inflammatory polypeptides such as the Ikappa B dominant mutant, sarcospan, utrophin, a micro-dystrophin, laminin-a2, alpha-sarcoglycan, beta-sarcoglycan, gamma-sarcoglycan, delta-sarcoglycan, IGF-1, an antibody or antibody fragment against myostatin or myostatin propeptide, and/or RNAi against myostatin. In particular embodiments, the virus vector can be administered to skeletal, diaphragm and/or cardiac muscle as described elsewhere herein.

[0230] Alternatively, the disclosure can be practiced to deliver a nucleic acid to skeletal, cardiac or diaphragm muscle, which is used as a platform for production of a polypeptide (e.g., an enzyme) or functional RNA (e.g., RNAi, micro RNA, antisense RNA) that normally circulates in the blood or for systemic delivery to other tissues to treat and/or prevent a disorder (e.g., a metabolic disorder, such as diabetes [e.g., insulin], hemophilia [e.g., Factor IX or Factor VIII], a mucopolysaccharide disorder [e.g., Sly syndrome, Hurler Syndrome, Scheie Syndrome, Hurler-Scheie Syndrome, Hunter's Syndrome, Sanfilippo Syndrome A, B, C, D, Morquio Syndrome, Maroteaux-Lamy Syndrome, etc.] or a lysosomal storage disorder such as Gaucher's disease [glucocerebrosidase] or Fabry disease [a-galactosidase A] or a glycogen storage disorder such as Pompe disease [lysosomal acid alpha glucosidase]). Other suitable proteins for treating and/or preventing metabolic disorders are described herein. The use of muscle as a platform to express a nucleic acid of interest is described in U.S. Patent publication US 2002/0192189.

[0231] Thus, as one aspect, the disclosure further encompasses a method of treating and/or preventing a metabolic disorder in a subject in need thereof, the method comprising: administering a treatment or prevention effective amount of a virus vector of the disclosure to skeletal muscle of a subject, wherein the virus vector comprises a heterologous nucleic acid encoding a polypeptide, wherein the metabolic disorder is a result of a deficiency and/or defect in the polypeptide. Illustrative metabolic disorders and heterologous nucleic acids encoding polypeptides are described herein. Optionally, the polypeptide is secreted (e.g., a polypeptide that is a secreted polypeptide in its native state or that has been engineered to be secreted, for example, by operable association with a secretory signal sequence as is known in the art). Without being limited by any particular theory of the disclosure, according to this embodiment, administration to the skeletal muscle can result in secretion of the polypeptide into the systemic circulation and delivery to target tissue(s). Methods of delivering virus vectors to skeletal muscle is described in more detail herein.

[0232] The disclosure can also be practiced to produce noncoding RNA, such as antisense RNA, RNAi or other functional RNA (e.g., a ribozyme) for systemic delivery.

[0233] The disclosure also provides a method of treating and/or preventing congenital heart failure or PAD in a subject in need thereof, the method comprising administering a treatment or prevention effective amount of a virus vector of the disclosure to a mammalian subject, wherein the virus vector comprises a heterologous nucleic acid encoding, for example, a sarcoplasmic endoreticulum Ca²⁺-ATPase (SERCA2a), an angiogenic factor, phosphatase inhibitor I (I-1) and fragments thereof (e.g., I1C), RNAi against phospholamban; a phospholamban inhibitory or dominant-negative molecule such as phospholamban S16E, a zinc finger protein that regulates the phospholamban gene, beta-2-adrenergic receptor, beta-2-adrenergic receptor kinase (BARK), PI3 kinase, calsarcan, a β-adrenergic receptor kinase inhibitor (PARKct), inhibitor 1 of protein phosphatase 1 and fragments thereof (e.g., II C), S100A1, parvalbumin, adenylyl cyclase type 6, a molecule that effects G-protein coupled receptor kinase type 2 knockdown such as a truncated constitutively active bARKct, Pim-I, PGC-I α, SOD-1, SOD-2, EC-SOD, kallikrein, HIF, thymosin-p4, mir-1, mir-133, mir-206, mir-208 and/or mir-26a.

[0234] Injectables can be prepared in conventional forms, either as liquid solutions or suspensions, solid forms suitable for solution or suspension in liquid prior to injection, or as emulsions. Alternatively, one may administer the virus vector and/or virus capsids of the disclosure in a local rather than systemic manner, for example, in a depot or sustained-release formulation. Further, the virus vector and/or virus capsid can be delivered adhered to a surgically implantable matrix (e.g., as described in U.S. Patent Publication No. US-2004-0013645-A1).

[0235] The virus vectors and/or virus capsids disclosed herein can be administered to the lungs of a subject by any suitable means, optionally by administering an aerosol suspension of respirable particles comprised of the virus vectors and/or virus capsids, which the subject inhales. The respirable particles can be liquid or solid. Aerosols of liquid particles comprising the virus vectors and/or virus capsids may be produced by any suitable means, such as with a pressure-driven aerosol nebulizer or an ultrasonic nebulizer, as is known to those of skill in the art. See, e.g., U.S. Pat. No. 4,501,729. Aerosols of solid particles comprising the virus vectors and/or capsids may likewise be produced with any solid particulate medicament aerosol generator, by techniques known in the pharmaceutical art.

[0236] The virus vectors and virus capsids can be administered to tissues of the CNS (e.g., brain, eye) and may advantageously result in broader distribution of the virus vector or capsid than would be observed in the absence of the present disclosure.

[0237] In particular embodiments, the delivery vectors described herein may be administered to treat diseases of the CNS, including genetic disorders, neurodegenerative disorders, psychiatric disorders and tumors. Illustrative diseases of the CNS include, but are not limited to Alzheimer's disease, Parkinson's disease, Huntington's disease, Canavan disease, Leigh's disease, Refsum disease, Tourette syndrome, primary lateral sclerosis, amyotrophic lateral sclerosis, progressive muscular atrophy, Pick's disease, muscular dystrophy, multiple sclerosis, myasthenia gravis, Binswanger's disease, trauma due to spinal cord or head injury, Tay Sachs disease, Lesch-Nyhan disease, epilepsy, cerebral infarcts, psychiatric disorders including mood disorders (e.g., depression, bipolar affective disorder, persistent affective disorder, secondary mood disorder), schizophrenia, drug dependency (e.g., alcoholism and other substance dependencies), neuroses (e.g., anxiety, obsessional disorder, somatoform disorder, dissociative disorder, grief, post-partum depression), psychosis (e.g., hallucinations and delusions), dementia, paranoia, attention deficit disorder, psychosexual disorders, sleeping disorders, pain disorders, eating or weight disorders (e.g., obesity, cachexia, anorexia nervosa, and bulemia) and cancers and tumors (e.g., pituitary tumors) of the CNS.

[0238] Disorders of the CNS include ophthalmic disorders involving the retina, posterior tract, and optic nerve (e.g., retinitis pigmentosa, diabetic retinopathy and other retinal degenerative diseases, uveitis, age-related macular degeneration, glaucoma).

[0239] Most, if not all, ophthalmic diseases and disorders are associated with one or more of three types of indications: (1) angiogenesis, (2) inflammation, and (3) degeneration. The delivery vectors of the present disclosure can be employed to deliver anti-angiogenic factors; anti-inflammatory factors; factors that retard cell degeneration, promote cell sparing, or promote cell growth and combinations of the foregoing.

[0240] Diabetic retinopathy, for example, is characterized by angiogenesis. Diabetic retinopathy can be treated by delivering one or more anti-angiogenic factors either intraocularly (e.g., in the vitreous) or periocularly (e.g., in the sub-Tenon's region). One or more neurotrophic factors may also be co-delivered, either intraocularly (e.g., intravitreally) or periocularly.

[0241] Uveitis involves inflammation. One or more anti-inflammatory factors can be administered by intraocular (e.g., vitreous or anterior chamber) administration of a delivery vector of the disclosure.

[0242] Retinitis pigmentosa, by comparison, is characterized by retinal degeneration. In representative embodiments, retinitis pigmentosa can be treated by intraocular (e.g., vitreal administration) of a delivery vector encoding one or more neurotrophic factors.

[0243] Age-related macular degeneration involves both angiogenesis and retinal degeneration. This disorder can be treated by administering the inventive delivery vectors encoding one or more neurotrophic factors intraocularly (e.g., vitreous) and/or one or more anti-angiogenic factors intraocularly or periocularly (e.g., in the sub-Tenon's region).

[0244] Glaucoma is characterized by increased ocular pressure and loss of retinal ganglion cells. Treatments for glaucoma include administration of one or more neuroprotective agents that protect cells from excitotoxic damage using the inventive delivery vectors. Such agents include N-methyl-D-aspartate (NMDA) antagonists, cytokines, and neurotrophic factors, delivered intraocularly, optionally intravitreally.

[0245] In other embodiments, the present disclosure may be used to treat seizures, e.g., to reduce the onset, incidence or severity of seizures. The efficacy of a therapeutic treatment for seizures can be assessed by behavioral (e.g., shaking, ticks of the eye or mouth) and/or electrographic means (most seizures have signature electrographic abnormalities). Thus, the disclosure can also be used to treat epilepsy, which is marked by multiple seizures over time.

[0246] In one representative embodiment, somatostatin (or an active fragment thereof) is administered to the brain using a delivery vector of the disclosure to treat a pituitary tumor. According to this embodiment, the delivery vector encoding somatostatin (or an active fragment thereof) is administered by microinfusion into the pituitary. Likewise, such treatment can be used to treat acromegaly (abnormal growth hormone secretion from the pituitary). The nucleic acid (e.g., GenBank Accession No. J00306) and amino acid (e.g., GenBank Accession No. P01166; contains processed active peptides somatostatin-28 and somatostatin-14) sequences of somatostatins are known in the art.

[0247] In particular embodiments, the vector can comprise a secretory signal as described in U.S. Pat. No. 7,071,172.

[0248] In representative embodiments of the disclosure, the virus vector and/or virus capsid is administered to the CNS (e.g., to the brain or to the eye). The virus vector and/or capsid may be introduced into the spinal cord, brainstem (medulla oblongata, pons), midbrain (hypothalamus, thalamus, epithalamus, pituitary gland, substantia nigra, pineal gland), cerebellum, telencephalon (corpus striatum, cerebrum including the occipital, temporal, parietal and frontal lobes, cortex, basal ganglia, hippocampus and portaamygdala), limbic system, neocortex, corpus striatum, cerebrum, and inferior colliculus. The virus vector and/or capsid may also be administered to different regions of the eye such as the retina, cornea and/or optic nerve.

[0249] The virus vector and/or capsid may be delivered into the cerebrospinal fluid (e.g., by lumbar puncture) for more disperse administration of the delivery vector. The virus vector and/or capsid may further be administered intravascularly to the CNS in situations in which the blood-brain barrier has been perturbed (e.g., brain tumor or cerebral infarct).

[0250] The virus vector and/or capsid can be administered to the desired region(s) of the CNS by any route known in the art, including but not limited to, intrathecal, intra-ocular, intracerebral, intraventricular, intravenous (e.g., in the presence of a sugar such as mannitol), intranasal, intra-aural, intra-ocular (e.g., intra-vitreous, sub-retinal, anterior chamber) and peri-ocular (e.g., sub-Tenon's region) delivery as well as intramuscular delivery with retrograde delivery to motor neurons. In particular embodiments, the virus vector and/or capsid is administered in a liquid formulation by direct injection (e.g., stereotactic injection) to the desired region or compartment in the CNS. In other embodiments, the virus vector and/or capsid may be provided by topical application to the desired region or by intra-nasal administration of an aerosol formulation. Administration to the eye, may be by topical application of liquid droplets. As a further alternative, the virus vector and/or capsid may be administered as a solid, slow-release formulation (see, e.g., U.S. Pat. No. 7,201,898).

[0251] In yet additional embodiments, the virus vector can used for retrograde transport to treat and/or prevent diseases and disorders involving motor neurons (e.g., amyotrophic lateral sclerosis (ALS); spinal muscular atrophy (SMA), etc.). For example, the virus vector can be delivered to muscle tissue from which it can migrate into neurons.

### Numbered Embodiments

[0252] The following numbered embodiments are included within the scope of the disclosure.

[0253] 1. A recombinant adeno-associated virus (AAV) capsid protein, wherein the capsid protein comprises a substitution in an antigenic site of the AAV capsid protein, wherein the substitution has a sequence of any one of SEQ ID NO: 9, 10, 11, 12, 13, 14, 15, 16, 17, 297, 298, 299, or 411-421.

[0254] 2. The recombinant AAV capsid protein of embodiment 1, wherein the substitution comprises a sequence of any one of SEQ ID NO: 9, 10, 14, or 17.

[0255] 3. The recombinant AAV capsid protein of embodiment 1 or 2, wherein the AAV capsid protein comprises a first amino acid substitution and a second amino acid substitution, wherein the first amino acid substitution and the second amino acid substitution each modify a different antigenic site on the AAV capsid protein, wherein the first amino acid substitution and the second amino acid substitution each comprise any one of SEQ ID NO: 9, 10, 11, 12, 13, 14, 15, 16, 17, 297, 298, 299, or 411-421.

[0256] 4. The recombinant AAV capsid protein of embodiment 1 or 2, wherein the AAV capsid protein comprises a first acid substitution, a second amino acid substitution, and a third amino acid substitution, wherein the first amino acid substitution, the second amino acid substitution, and the third amino acid substitution each modify a different antigenic site on the AAV capsid protein, wherein the first amino acid substitution, the second amino acid substitution and the third amino acid substitution each comprise any one of SEQ ID NO: 9, 10, 11, 12, 13, 14, 15, 16, 17, 297, 298, 299, or 411-421.

[0257] 5. The recombinant AAV capsid of embodiment 4, wherein the first amino acid substitution comprises SEQ ID NO. 9; the second amino acid substitution comprises any one of SEQ ID NO. 10, 11, 12, 13, 14, 15, 16, 297, 298, 299, or 411-421; and the third amino acid substitution comprises SEQ ID NO. 17.

[0258] 6. The recombinant AAV capsid of embodiment 5, wherein the first amino acid substitution comprises SEQ ID NO. 9; the second amino acid substitution comprises SEQ ID NO. 10; and the third amino acid substitution comprises SEQ ID NO. 17.

[0259] 7. The recombinant AAV capsid of embodiment 5, wherein the first amino acid substitution comprises SEQ ID NO. 9; the second amino acid substitution comprises SEQ ID NO. 14; and the third amino acid substitution comprises SEQ ID NO. 17.

[0260] 8. The recombinant AAV capsid protein of any one of embodiments 1-7, wherein the AAV capsid protein further comprises a substitution that modifies the HI loop of the capsid.

[0261] 9. The recombinant AAV capsid protein of embodiment 8, wherein the AAV capsid comprises one or more of the following substitutions in the HI loop:

[0262] P661R, T662S, Q666G, S667D, wherein the numbering corresponds to the wildtype AAV8 capsid (SEQ ID NO: 6); or

[0263] P659R, T660S, A661T, K664G, wherein the numbering corresponds to the wildtype AAV9 capsid (SEQ ID NO: 7).

[0264] 10. The recombinant AAV capsid protein of any one of embodiment 1 to 9, wherein the AAV capsid protein is of an AAV serotype selected from AAV1, AAV2, AAV3, AAV4, AAV5, AAV6, AAV7, AAV8, AAV9, AAV10, AAV11, AAV12, AAVrh.8, AAVrh.10, AAVrh32.33, AAVrh74, bovine AAV and avian AAV.

[0265] 11. The recombinant AAV capsid protein of any one of embodiments 1 to 9, wherein the AAV capsid protein is chimeric.

[0266] 12. The recombinant AAV capsid protein of embodiment 11, wherein the AAV capsid protein comprises sequences derived from two or more AAV serotypes.

[0267] 13. The recombinant AAV capsid protein of embodiment 12, wherein the AAV capsid protein comprises sequences derived from three or more AAV serotypes.

[0268] 14. The recombinant AAV capsid protein of any one of embodiments 1-10, wherein the AAV capsid protein comprises an amino acid sequence that has at least 90% sequence identity with any one of SEQ ID NOs: 18-80, 300-410, 422-612, or 783-785.

[0269] 15. The recombinant AAV capsid protein of embodiment 14, wherein the AAV capsid protein comprises an amino acid sequence of any one of SEQ ID NOs: 18-80, 300-410, 422-612, or 783-785.

[0270] 16. The recombinant AAV capsid protein of embodiment 15, wherein the AAV capsid protein comprises an amino acid sequence of SEQ ID NO: 380 or SEQ ID NO: 384.

[0271] 17. The recombinant AAV capsid protein of any one of embodiments 1 to 16, wherein the modification of the one or more antigenic sites results in inhibition of binding by an antibody to the one or more antigenic sites.

[0272] 18. The recombinant AAV capsid protein of any one of embodiments 1 to 17, wherein the modification of the one or more antigenic sites results in inhibition of neutralization of infectivity of a virus particle comprising said AAV capsid protein.

[0273] 19. A recombinant AAV capsid protein comprising the amino acid sequence of SEQ ID NO: 49.

[0274] 20. The recombinant AAV capsid protein of embodiment 19, wherein the AAV capsid protein is modified by replacing the region spanning amino acids 454-460 of SEQ ID NO: 49 with SEQ ID NO: 9.

[0275] 21. The recombinant AAV capsid protein of any one of embodiments 19 or 20, wherein the AAV capsid protein is modified by replacing the region spanning amino acids 493-500 of SEQ ID NO: 49 with any one of SEQ ID NO: 10, 11, 12, 13, 14, 15, 16, 297, 298, 299, or 411-421.

[0276] 22. The recombinant AAV capsid protein of any one of embodiments 19 to 21, wherein the AAV capsid protein is modified by replacing the region spanning amino acids 585-590 of SEQ ID NO: 49 with SEQ ID NO: 17.

[0277] 23. The recombinant AAV capsid protein of any one of embodiments 19 to 22, wherein the AAV capsid protein is modified by replacing the region spanning amino acids 454-460 of SEQ ID NO: 49 with SEQ ID NO: 9, the region spanning amino acids 493-500 of SEQ ID NO: 49 with any one of SEQ ID NO: 10, 11, 12, 13, 14, 15, 16, 297, 298, 299, or 411-421, and the region spanning amino acids 585-590 of SEQ ID NO: 49 with SEQ ID NO: 17.

[0278] 24. The recombinant AAV capsid protein of any one of embodiments 19 to 23, wherein the modification results in inhibition of binding by an antibody to the AAV capsid protein.

[0279] 25. The recombinant AAV capsid protein of any one of embodiments 19 to 24, wherein the modification results in inhibition of neutralization of infectivity of a virus particle comprising the AAV capsid protein.

[0280] 26. A recombinant AAV capsid protein comprising the amino acid sequence of any one of SEQ ID NO: 18-80, 300-410, 422-612, or 783-785.

[0281] 27. A recombinant AAV capsid protein comprising the amino acid sequence of SEQ ID NO: 380 or SEQ ID NO: 384.

[0282] 28. A nucleotide sequence encoding a recombinant AAV capsid protein of any one of embodiments 1 to 27.

[0283] 29. The nucleotide sequence of embodiment 28, wherein the nucleotide sequence is a DNA sequence.

[0284] 30. The nucleotide sequence of embodiment 28, wherein the nucleotide sequence is an RNA sequence.

[0285] 31. An expression vector comprising the nucleotide sequence of any one of embodiments 28-30.

[0286] 32. A cell comprising the nucleotide sequence of any one of embodiments 28-30, or the expression vector of embodiment 31.

[0287] 33. An AAV viral vector comprising the recombinant capsid protein of any one of embodiments 1 to 27.

[0288] 34. The AAV viral vector of embodiment 33, further comprising a cargo nucleic acid encapsidated by the capsid protein.

[0289] 35. The AAV viral vector of embodiment 34, wherein the cargo nucleic acid encodes a therapeutic protein or RNA.

[0290] 36. The AAV viral vector of any one of embodiments 34-35, wherein the cargo nucleic acid encodes a gene-editing molecule.

[0291] 37. The AAV viral vector of embodiment 36, wherein the gene-editing molecule is a nuclease.

[0292] 38. The AAV viral vector of embodiment 37, wherein the gene-editing molecule is a Cas9 nuclease.

[0293] 39. The AAV viral vector of embodiment 37, wherein the gene-editing molecule is a Cpf1 nuclease.

[0294] 40. The AAV viral vector of embodiment 36, wherein the gene-editing molecule is a single guide RNA.

[0295] 41. A pharmaceutical composition comprising the AAV viral vector of any one of embodiment 33 to 40.

[0296] 42. The pharmaceutical composition of embodiment 41, wherein the composition further comprises a pharmaceutically acceptable carrier.

[0297] 43. A pharmaceutical composition comprising the cell of embodiment 32 or the expression vector of embodiment 31.

[0298] 44. The pharmaceutical composition of embodiment 43 wherein the composition further comprises a pharmaceutically acceptable carrier.

[0299] 45. A method of treating a patient in need thereof comprising administering to the patient a therapeutically effective amount of an AAV viral vector of any one of embodiments 33-40 or the pharmaceutical composition of any one of embodiments 41-44.

[0300] 46. The method of embodiment 45, wherein the patient has a liver disease or disorder.

[0301] 47. The method of embodiment 46, wherein the liver disease or disorder is primary biliary cirrhosis, nonalcoholic fatty liver disease (NAFLD), non-alcoholic steatohepatitis (NASH), autoimmune hepatitis, hepatitis B, hepatitis C, alcoholic liver disease, fibrosis, jaundice, primary sclerosing cholangitis (PSC), Budd-Chiari syndrome, hemochromatosis, Wilson's disease, alcoholic fibrosis, non-alcoholic fibrosis, liver steatosis, Gilbert's syndrome, biliary atresia, alpha-1-antitrypsin deficiency, alagille syndrome, progressive familial intrahepatic cholestasis, Hemophilia B, Hereditary Angioedema (HAE), Homozygous Familial Hypercholesterolemia (HoFH), Heterozygous Familial Hypercholesterolemia (HeFH), Von Gierke's Disease (GSD I), Hemophilia A, Methylmalonic Acidemia, Propionic Acidemia, Homocystinuria, Phenylketonuria (PKU), Tyrosinemia Type I, Arginase I Deficiency, Argininosuccinate Lyase Deficiency, Carbamoyl-phosphate synthetase 1 deficiency, Citrullinemia Type 1, Citrin Deficiency, Crigler-Najjar Syndrome Type 1, Cystinosis, Fabry Disease, Glycogen Storage Disease Ib, LPL Deficiency, N-Acetylglutamate Synthetase Deficiency, Ornithine Transcarbamylase Deficiency, Ornithine Translocase Deficiency, Primary Hyperoxaluria Type I, or ADA SCID.

[0302] 48. The method of embodiment 46, wherein the liver disease or disorder is liver cancer or metastasis.

[0303] 49. The method of any one of embodiments 45-48, wherein the patient is a mammal.

[0304] 50. The method of embodiment 49, wherein the patient is a human.

[0305] 51. A method of introducing a nucleic acid molecule into a cell, comprising contacting the cell with the AAV viral vector of any one of embodiments 33-40.

[0306] 52. An AAV viral vector of any one of embodiments 33-40 for use as a medicament.

[0307] 53. An AAV viral vector of any one of embodiments 33-40 for use in a method of treatment.

### EXAMPLES

[0308] The following examples, which are included herein for illustration purposes only, are not intended to be limiting.

### Example 1. Combinatorial Engineering and Selection of Antibody-Evading AAV Vectors

[0309] The method for generating antibody evading AAV mutants is as follows. The first step involves identification of conformational 3D antigenic epitopes on the AAV capsid surface, for example using cryo-electron microscopy. Selected residues within antigenic motifs are then subjected to mutagenesis using degenerate primers with each codon substituted by nucleotides NNK and gene fragments combined together by Gibson assembly and/or multistep PCR. Capsid-encoding genes containing a degenerate library of mutated antigenic motifs are cloned into a wild type AAV genome to replace the original Cap encoding DNA sequence, yielding a plasmid library. Plasmid libraries are then transfected into 293 producer cell lines with an adenoviral helper plasmid to generate AAV libraries (i.e. libraries of AAVs comprising the mutated AAV capsids described above), which can then be subjected to selection. Successful generation of AAV libraries is confirmed via DNA sequencing.

[0310] In order to select for new AAV strains that can escape neutralizing antibodies (NAbs), AAV libraries are subjected to multiple rounds of infection in non-human primates. At each stage, tissues of interest are isolated from animal subjects. Cell lysates harvested from the tissues of interest are sequenced to identify AAV isolates escaping antibody neutralization. After multiple rounds of infection in non-human primates, the isolated sequences from each mutagenized region are combined in all permutations and combinations. Each round of infection, tissue isolation, and sequencing is referred to herein as a round of evolution.

[0311] As a nonlimiting specific example, common antigenic motifs on an AAV capsid protein were subjected to mutagenesis as described above. The degenerate libraries of recombinant AAVs comprising the mutated capsids were then subjected to a first round of infection in non-human primates (FIG. 1A, FIG. 2A). Liver was harvested at day 7 post-infection and sequenced to identify single recombinant AAV isolates (FIG. 1B, FIG. 2B).

[0312] The AAVs isolated during this first round of evolution (FIG. 2B) where then reintroduced into a second non-human primate. Liver was harvested at day 7 post-infection and sequenced to identify single recombinant AAV isolates (FIG. 2C).

[0313] The AAVs isolated during the second round of evolution (FIG. 2C) where then reintroduced into a third non-human primate. Liver was harvested at day 7 post-infection and sequenced to identify single recombinant AAV isolates (FIG. 2D).

[0314] After each round of evolution, various recombinant AAV isolates were identified in liver samples. A description of various isolates is provided in Table 8 and in Table 6.1, above.

TABLE 8
Recombinant AAV Isolated from Liver

| Sequence Replacing | Full Capsid |
|---|---|
| Antigenic Sequence | Sequence |
| SNGRGV | SEQ ID NO: 18 |
| (SEQ ID NO: 9) | |
| NLAENFKY | SEQ ID NO: 19 |
| (SEQ ID NO: 10) | |
| VLSGDHSA | SEQ ID NO: 20 |
| (SEQ ID NO: 11) | |
| MSAASGSG | SEQ ID NO: 21 |
| (SEQ ID NO: 12) | |
| GTNLGKEQ | SEQ ID NO: 22 |
| (SEQ ID NO: 13) | |
| SSHSGTNQ | SEQ ID NO: 23 |
| (SEQ ID NO: 14) | |
| VATRDGQL | SEQ ID NO: 24 |
| (SEQ ID NO: 15) | |
| ALNADTGT | SEQ ID NO: 25 |
| (SEQ ID NO: 16) | |
| VMEPTR | SEQ ID NO: 26 |
| (SEQ ID NO: 17) | |
| VVGNGGVV | SEQ ID NO: 300 |
| (SEQ ID NO: 297) | |
| NFREMPIG | SEQ ID NO: 301 |
| (SEQ ID NO: 298) | |
| RRSEDMGTI | SEQ ID NO: 302 |
| (SEQ ID NO: 299) | |

### Example 2. Recombinant AAV Vectors Transduce Cells in Culture

[0315] To confirm whether various AAV vectors isolated from liver in Example 1 are generally infective and able to transduce cells in culture, various AAV vectors packaging a GFP transgene were prepared (AAV8, AAV-SB1 (SEQ ID NO. 380), AAV-SB6 (SEQ ID NO: 437). The AAV vectors were contacted with U87 cells (primary glioblastoma cell line) maintained under standard culture conditions. The cells were infected at a multiplicity of infection (MOI) of 40,000 vg/cell. 48 hours later, the cells were imaged using a fluorescent microscope.

[0316] As shown in FIG. 8, all AAV vectors tested were able to successfully transduce U87 cells in culture, resulting in expression of their packaged transgene (GFP) in the cells. This data confirms that the recombinant AAV vectors are infective and can be used to deliver a transgene to a cell of interest.

### Example 3. In Vitro Characterization of Recombinant AAVs Targeting Liver

[0317] Five recombinant capsid proteins comprising one or more of the substitutions identified in Example 1, above, were selected for in vitro characterization following in vivo evolution: SB1 (SEQ ID NO: 380), SB2 (SEQ ID NO: 384), SB3 (SEQ ID NO: 783), SB4 (SEQ ID NO: 784), SB5 (SEQ ID NO: 785). Recombinant AAV vectors were prepared that comprised the recombinant capsid proteins and packaged a luciferase transgene. These AAV vectors (AAV-SB1, AAV-SB2, AAV-SB3, AAV-SB4, and AAV-SB5) were derived from a parental AAV8 strain.

[0318] The five recombinant AAV vectors were contacted with HepG2 cells and Huh7 cells in culture, at a multiplicity of infection (MOI) of 10,000 vg/cell. Subsequently, the cells were lysed, and the lysate was contacted with a bioluminescent substrate, and RFUs were measured. As shown in FIG. 3, all five AAVs had improved tropism for human hepatocytes in vitro compared to the parental AAV8 strain, with AAV-SB1 showing up to 2-logs increase in luciferase expression.

[0319] To test for improved escape of neutralizing antibodies over the parental AAV8, the five AAV-luciferase constructs were incubated with or without 0.25 mg/mL human intravenous immunoglobulin (IVIG) prior to transduction of U87 human glioblastoma cells. Shown in FIG. 4 is the percent transduction as compared to no IVIG incubation as measured by luciferase expression. AAV-SB1, AAV-SB2, and AAV-SB5 showed the greatest improvement in transduction efficiency in the presence of IVIG compared with parental AAV8. Further IVIG dose ranging analyses demonstrated that higher concentrations of IVIG are necessary to neutralize AAV-SB1 compared to parental AAV8 (FIG. 5).

[0320] Together, these data confirm the significant improvement in liver cell tropism in vitro and improvement in antibody escape of the recombinant AAVs compared with the parental AAV8 serotype.

### Example 4. Human Serum Screen for AAV Neutralizing Antibodies

[0321] Parental AAV8, AAV-SB1, AAV-SB2, and three other liver-targeting capsids (AAV5, HSC15, and LK03) were tested in a neutralization assay against 100 samples of donor serum. The transduction efficiency of each AAV on U87 cells in the presence of a 1:5 dilution of serum was compared to transduction efficiency without serum as measured by levels of luciferase expression. A serum sample that reduced luciferase expression of an AAV vector to less than 50% of luciferase levels without serum was considered neutralizing.

[0322] FIG. 6A shows the percentage of samples that were neutralizing (strongly-neutralizing, <20% transduction efficiency; moderately-neutralizing, 20-50% transduction efficiency) to the indicated AAV. AAV-SB1 was neutralized by the fewest samples (15%), whereas the parental AAV8 capsid was neutralized by 25% of samples. Of the other capsids, LK03 was neutralized by the greatest number of samples (40%) and AAVS by the fewest (20%). Notably, with one exception, all samples that were seropositive for AAV-SB01 were seropositive for all of the other capsids. The one exception had a percent-transduction efficiency of 49.58% (just slightly below the 50% cut-off).

[0323] The breakdown of donors who are seropositive for the indicated capsid by age groups is shown below in FIG. 6B. A similar pattern of distribution among the age groups is seen with the age 30-35 group having the greatest number of seropositive donors and the age 36-40 group having the least number.

### Example 5. Biodistribution of Recombinant AAVs in Normal Mice

[0324] This study was performed to assess whether evolution of capsid tropism to liver in non-human primates (NHP) would impact liver tropism in mice, which is important for the execution of proof-of-concept studies in available mouse models. A small study was conducted in normal BI/6 mice. The study design is illustrated in Table 9 below. Mice were injected IV with one of two doses, and tissues were collected 30 days post-injection for immunohistochemistry (IHC) analysis for GFP expression, and for vector genome (vg) quantification by qPCR.

TABLE 9
Mouse biodistribution study design

| Group | | Dose Level | Number of Animals | |
|---|---|---|---|---|
| Number | AAV | (vg/kg) | Male | Female |
| 1 | AAB-SB1-GFP | 3 × 10¹² | 2 | 2 |
| 2 | AAV8 (parental)-GFP | 3 × 10¹² | 2 | 2 |

[0325] Tropism of AAV-SB1-GFP for mouse liver was confirmed to be similar to that of the parental AAV8 vector. IHC staining (FIG. 7) demonstrated similar levels of GFP expression between AAV8 and AAV-SB1, but expected differences between genders. Table 10 below shows the vg copy number per pg total DNA for each tissue. Each column represents a different mouse.

TABLE 10
Vector genome (per μg DNA) distribution in normal mice

| tissues | Group 1 (AAV-SB1-GFP, 3 × 10¹² vg/mL) | | | |
|---|---|---|---|---|
| Pancreas | 1.03 × 10⁻⁰³ | 3.35 × 10⁻⁰⁴ | 1.86 × 10⁻⁰³ | 2.19 × 10⁻⁰³ |
| Spleen | 0.017 | 0.142 | 0.015 | 0.017 |
| Brain (cortex) | 3.70 × 10⁻⁰⁴ | 2.00 × 10⁻⁰⁴ | 6.15 × 10⁻⁰⁴ | 8.40 × l0⁻⁰⁴ |
| Heart | 6.49 × 10⁻⁰³ | 3.23 × 10⁻⁰³ | 0.013 | 0.014 |
| Kidney, left | 8.47 × 10⁻⁰³ | 2.25 × 10⁻⁰³ | 0.027 | 0.021 |
| Muscle* | 0.013 | 0.013 | 0.018 | 0.021 |
| Liver, pooled | 1.730 | 0.477 | 0.627 | 0.573 |
| | Group 2 (AAV8-GFP, 3 × 10¹² vg/mL) | | | |
| Pancreas | 3.65 × 10⁻⁰⁴ | 5.85 × 10⁻⁰⁴ | 1.03 × 10⁻⁰³ | 1.52 × 10⁻⁰³ |
| Spleen | 5.87 × 10⁻⁰³ | 5.78 × 10⁻⁰³ | 5.94 × 10⁻⁰³ | 8.55 × 10⁻⁰³ |
| Brain (cortex) | 3.05 × 10⁻⁰⁴ | 5.75 × 10⁻⁰⁴ | 5.50 × 10⁻⁰⁴ | 4.20 × 10⁻⁰⁴ |
| Heart | 4.93 × 10⁻⁰³ | 4.41 × 10⁻⁰³ | 7.64 × 10⁻⁰³ | 7.36 × 10⁻⁰³ |
| Kidney, left | 3.68 × 10⁻⁰³ | 4.63 × 10⁻⁰³ | 0.014 | 8.55 × 10⁻⁰³ |
| Muscle* | 8.34 × 10⁻⁰³ | 3.23 × 10⁻⁰³ | 7.98 × 10⁻⁰³ | 8.71 × 10⁻⁰³ |
| Liver, pooled | 0.993 | 0.887 | 0.454 | 0.342 |

*muscle, gastrocnemius
BLOD - below limit of detection

[0326] The foregoing is illustrative of the present invention, and is not to be construed as limiting thereof. The invention is defined by the following claims, with equivalents of the claims to be included therein.

The application's sequence listing, which the Patent Office published only in electronic form, follows.

SEQUENCE LISTING (785 sequences)

SEQ ID NO: 1 - protein, 736 aa, Dependovirus adeno-associated virus 1
MAADGYLPDWLEDNLSEGIREWWDLKPGAPKPKANQQKQDDGRGLVLPGYKYLGPFNGLDKGEPVNAADAAALEHDKAYDQQLKAGDNPYLRYNHADAEFQERLQEDTSFGGNLGRAVFQAKKRVLEPLGLVEEGAKTAPGKKRPVEQSPQEPDSSSGIGKTGQQPAKKRLNFGQTGDSESVPDPQPLGEPPATPAAVGPTTMASGGGAPMADNNEGADGVGNASGNWHCDSTWLGDRVITTSTRTWALPTYNNHLYKQISSASTGASNDNHYFGYSTPWGYFDFNRFHCHFSPRDWQRLINNNWGFRPKRLNFKLFNIQVKEVTTNDGVTTIANNLTSTVQVFSDSEYQLPYVLGSAHQGCLPPFPADVFMIPQYGYLTLNNGSQAVGRSSFYCLEYFPSQMLRTGNNFTFSYTFEEVPFHSSYAHSQSLDRLMNPLIDQYLYYLNRTQNQSGSAQNKDLLFSRGSPAGMSVQPKNWLPGPCYRQQRVSKTKTDNNNSNFTWTGASKYNLNGRESIINPGTAMASHKDDEDKFFPMSGVMIFGKESAGASNTALDNVMITDEEEIKATNPVATERFGTVAVNFQSSSTDPATGDVHAMGALPGMVWQDRDVYLQGPIWAKIPHTDGHFHPSPLMGGFGLKNPPPQILIKNTPVPANPPAEFSATKFASFITQYSTGQVSVEIEWELQKENSKRWNPEVQYTSNYAKSANVDFTVDNNGLYTEPRPIGTRYLTRPL

SEQ ID NO: 2 - protein, 735 aa, Dependovirus adeno-associated virus 2 [sequence omitted]

SEQ ID NO: 3 - protein, 736 aa, Dependovirus adeno-associated virus 3
MAADGYLPDWLEDNLSEGIREWWALKPGVPQPKANQQHQDNRRGLVLPGYKYLGPGNGLDKGEPVNEADAAALEHDKAYDQQLKAGDNPYLKYNHADAEFQERLQEDTSFGGNLGRAVFQAKKRILEPLGLVEEAAKTAPGKKRPVDQSPQEPDSSSGVGKSGKQPARKRLNFGQTGDSESVPDPQPLGEPPAAPTSLGSNTMASGGGAPMADNNEGADGVGNSSGNWHCDSQWLGDRVITTSTRTWALPTYNNHLYKQISSQSGASNDNHYFGYSTPWGYFDFNRFHCHFSPRDWQRLINNNWGFRPKKLSFKLFNIQVKEVTQNDGTTTIANNLTSTVQVFTDSEYQLPYVLGSAHQGCLPPFPADVFMVPQYGYLTLNNGSQAVGRSSFYCLEYFPSQMLRTGNNFQFSYTFEDVPFHSSYAHSQSLDRLMNPLIDQYLYYLNRTQGTTSGTTNQSRLLFSQAGPQSMSLQARNWLPGPCYRQQRLSKTANDNNNSNFPWTAASKYHLNGRDSLVNPGPAMASHKDDEEKFFPMHGNLIFGKEGTTASNAELDNVMITDEEEIRTTNPVATEQYGTVANNLQSSNTAPTTRTVNDQGALPGMVWQDRDVYLQGPIWAKIPHTDGHFHPSPLMGGFGLKHPPPQIMIKNTPVPANPPTTFSPAKFASFITQYSTGQVSVEIEWELQKENSKRWNPEIQYTSNYNKSVNVDFTVDTNGVYSEPRPIGTRYLTRNL

SEQ ID NO: 4 - protein, 736 aa, Dependovirus adeno-associated virus 6
MAADGYLPDWLEDNLSEGIREWWDLKPGAPKPKANQQKQDDGRGLVLPGYKYLGPFNGLDKGEPVNAADAAALEHDKAYDQQLKAGDNPYLRYNHADAEFQERLQEDTSFGGNLGRAVFQAKKRVLEPLGLVEEGAKTAPGKKRPVEQSPQEPDSSSGIGKTGQQPAKKRLNFGQTGDSESVPDPQPLGEPPATPAAVGPTTMASGGGAPMADNNEGADGVGNASGNWHCDSTWLGDRVITTSTRTWALPTYNNHLYKQISSASTGASNDNHYFGYSTPWGYFDFNRFHCHFSPRDWQRLINNNWGFRPKRLNFKLFNIQVKEVTTNDGVTTIANNLTSTVQVFSDSEYQLPYVLGSAHQGCLPPFPADVFMIPQYGYLTLNNGSQAVGRSSFYCLEYFPSQMLRTGNNFTFSYTFEDVPFHSSYAHSQSLDRLMNPLIDQYLYYLNRTQNQSGSAQNKDLLFSRGSPAGMSVQPKNWLPGPCYRQQRVSKTKTDNNNSNFTWTGASKYNLNGRESIINPGTAMASHKDDKDKFFPMSGVMIFGKESAGASNTALDNVMITDEEEIKATNPVATERFGTVAVNLQSSSTDPATGDVHVMGALPGMVWQDRDVYLQGPIWAKIPHTDGHFHPSPLMGGFGLKHPPPQILIKNTPVPANPPAEFSATKFASFITQYSTGQVSVEIEWELQKENSKRWNPEVQYTSNYAKSANVDFTVDNNGLYTEPRPIGTRYLTRPL

SEQ ID NO: 5 - protein, 737 aa, Dependovirus adeno-associated virus 7
MAADGYLPDWLEDNLSEGIREWWDLKPGAPKPKANQQKQDNGRGLVLPGYKYLGPFNGLDKGEPVNAADAAALEHDKAYDQQLKAGDNPYLRYNHADAEFQERLQEDTSFGGNLGRAVFQAKKRVLEPLGLVEEGAKTAPAKKRPVEPSPQRSPDSSTGIGKKGQQPARKRLNFGQTGDSESVPDPQPLGEPPAAPSSVGSGTVAAGGGAPMADNNEGADGVGNASGNWHCDSTWLGDRVITTSTRTWALPTYNNHLYKQISSETAGSTNDNTYFGYSTPWGYFDFNRFHCHFSPRDWQRLINNNWGFRPKKLRFKLFNIQVKEVTTNDGVTTIANNLTSTIQVFSDSEYQLPYVLGSAHQGCLPPFPADVFMIPQYGYLTLNNGSQSVGRSSFYCLEYFPSQMLRTGNNFEFSYSFEDVPFHSSYAHSQSLDRLMNPLIDQYLYYLARTQSNPGGTAGNRELQFYQGGPSTMAEQAKNWLPGPCFRQQRVSKTLDQNNNSNFAWTGATKYHLNGRNSLVNPGVAMATHKDDEDRFFPSSGVLIFGKTGATNKTTLENVLMTNEEEIRPTNPVATEEYGIVSSNLQAANTAAQTQVVNNQGALPGMVWQNRDVYLQGPIWAKIPHTDGNFHPSPLMGGFGLKHPPPQILIKNTPVPANPPEVFTPAKFASFITQYSTGQVSVEIEWELQKENSKRWNPEIQYTSNFEKQTGVDFAVDSQGVYSEPRPIGTRYLTRNL

SEQ ID NO: 6 - protein, 738 aa, Dependovirus adeno-associated virus 8
MAADGYLPDWLEDNLSEGIREWWALKPGAPKPKANQQKQDDGRGLVLPGYKYLGPFNGLDKGEPVNAADAAALEHDKAYDQQLQAGDNPYLRYNHADAEFQERLQEDTSFGGNLGRAVFQAKKRVLEPLGLVEEGAKTAPGKKRPVEPSPQRSPDSSTGIGKKGQQPARKRLNFGQTGDSESVPDPQPLGEPPAAPSGVGPNTMAAGGGAPMADNNEGADGVGSSSGNWHCDSTWLGDRVITTSTRTWALPTYNNHLYKQISNGTSGGATNDNTYFGYSTPWGYFDFNRFHCHFSPRDWQRLINNNWGFRPKRLSFKLFNIQVKEVTQNEGTKTIANNLTSTIQVFTDSEYQLPYVLGSAHQGCLPPFPADVFMIPQYGYLTLNNGSQAVGRSSFYCLEYFPSQMLRTGNNFQFTYTFEDVPFHSSYAHSQSLDRLMNPLIDQYLYYLSRTQTTGGTANTQTLGFSQGGPNTMANQAKNWLPGPCYRQQRVSTTTGQNNNSNFAWTAGTKYHLNGRNSLANPGIAMATHKDDEERFFPSNGILIFGKQNAARDNADYSDVMLTSEEEIKTTNPVATEEYGIVADNLQQQNTAPQIGTVNSQGALPGMVWQNRDVYLQGPIWAKIPHTDGNFHPSPLMGGFGLKHPPPQILIKNTPVPADPPTTFNQSKLNSFITQYSTGQVSVEIEWELQKENSKRWNPEIQYTSNYYKSTSVDFAVNTEGVYSEPRPIGTRYLTRNL

SEQ ID NO: 7 - protein, 736 aa, Dependovirus adeno-associated virus 9
MAADGYLPDWLEDNLSEGIREWWALKPGAPQPKANQQHQDNARGLVLPGYKYLGPGNGLDKGEPVNAADAAALEHDKAYDQQLKAGDNPYLKYNHADAEFQERLKEDTSFGGNLGRAVFQAKKRLLEPLGLVEEAAKTAPGKKRPVEQSPQEPDSSAGIGKSGAQPAKKRLNFGQTGDTESVPDPQPIGEPPAAPSGVGSLTMASGGGAPVADNNEGADGVGSSSGNWHCDSQWLGDRVITTSTRTWALPTYNNHLYKQISNSTSGGSSNDNAYFGYSTPWGYFDFNRFHCHFSPRDWQRLINNNWGFRPKRLNFKLFNIQVKEVTDNNGVKTIANNLTSTVQVFTDSDYQLPYVLGSAHEGCLPPFPADVFMIPQYGYLTLNDGSQAVGRSSFYCLEYFPSQMLRTGNNFQFSYEFENVPFHSSYAHSQSLDRLMNPLIDQYLYYLSKTINGSGQNQQTLKFSVAGPSNMAVQGRNYIPGPSYRQQRVSTTVTQNNNSEFAWPGASSWALNGRNSLMNPGPAMASHKEGEDRFFPLSGSLIFGKQGTGRDNVDADKVMITNEEEIKTTNPVATESYGQVATNHQSAQAQAQTGWVQNQGILPGMVWQDRDVYLQGPIWAKIPHTDGNFHPSPLMGGFGMKHPPPQILIKNTPVPADPPTAFNKDKLNSFITQYSTGQVSVEIEWELQKENSKRWNPEIQYTSNYYKSNNVEFAVNTEGVYSEPRPIGTRYLTRNL

SEQ ID NO: 8 - protein, 738 aa, Dependovirus adeno-associated virus rh.10
MAADGYLPDWLEDNLSEGIREWWDLKPGAPKPKANQQKQDDGRGLVLPGYKYLGPFNGLDKGEPVNAADAAALEHDKAYDQQLKAGDNPYLRYNHADAEFQERLQEDTSFGGNLGRAVFQAKKRVLEPLGLVEEGAKTAPGKKRPVEPSPQRSPDSSTGIGKKGQQPAKKRLNFGQTGDSESVPDPQPIGEPPAGPSGLGSGTMAAGGGAPMADNNEGADGVGSSSGNWHCDSTWLGDRVITTSTRTWALPTYNNHLYKQISNGTSGGSTNDNTYFGYSTPWGYFDFNRFHCHFSPRDWQRLINNNWGFRPKRLNFKLFNIQVKEVTQNEGTKTIANNLTSTIQVFTDSEYQLPYVLGSAHQGCLPPFPADVFMIPQYGYLTLNNGSQAVGRSSFYCLEYFPSQMLRTGNNFEFSYQFEDVPFHSSYAHSQSLDRLMNPLIDQYLYYLSRTQSTGGTAGTQQLLFSQAGPNNMSAQAKNWLPGPCYRQQRVSTTLSQNNNSNFAWTGATKYHLNGRDSLVNPGVAMATHKDDEERFFPSSGVLMFGKQGAGKDNVDYSSVMLTSEEEIKTTNPVATEQYGVVADNLQQQNAAPIVGAVNSQGALPGMVWQNRDVYLQGPIWAKIPHTDGNFHPSPLMGGFGLKHPPPQILIKNTPVPADPPTTFSQAKLASFITQYSTGQVSVEIEWELQKENSKRWNPEIQYTSNYYKSTNVDFAVNTDGTYSEPRPIGTRYLTRNL

SEQ ID NO: 9 - protein, 6 aa, Artificial Sequence
  AAV capsid protein amino acid substitution
SNGRGV

SEQ ID NO: 10 - protein, 8 aa, Artificial Sequence
  AAV capsid protein amino acid substitution
NLAENFKY

SEQ ID NO: 11 - protein, 8 aa, Artificial Sequence
  AAV capsid protein amino acid substitution
VLSGDHSA

SEQ ID NO: 12 - protein, 8 aa, Artificial Sequence
  AAV capsid protein amino acid substitution
MSAASGSG

SEQ ID NO: 13 - protein, 8 aa, Artificial Sequence
  AAV capsid protein amino acid substitution
GTNLGKEQ

SEQ ID NO: 14 - protein, 8 aa, Artificial Sequence
  AAV capsid protein amino acid substitution
SSHSGTNQ

SEQ ID NO: 15 - protein, 8 aa, Artificial Sequence
  AAV capsid protein amino acid substitution
VATRDGQL

SEQ ID NO: 16 - protein, 8 aa, Artificial Sequence
  AAV capsid protein amino acid substitution
ALNADTGT

SEQ ID NO: 17 - protein, 6 aa, Artificial Sequence
  AAV capsid protein amino acid substitution
VMEPTR

SEQ ID NO: 18 - protein, 737 aa, Artificial Sequence
  AAV capsid variant
MAADGYLPDWLEDNLSEGIREWWALKPGAPKPKANQQKQDDGRGLVLPGYKYLGPFNGLDKGEPVNAADAAALEHDKAYDQQLQAGDNPYLRYNHADAEFQERLQEDTSFGGNLGRAVFQAKKRVLEPLGLVEEGAKTAPGKKRPVEPSPQRSPDSSTGIGKKGQQPARKRLNFGQTGDSESVPDPQPLGEPPAAPSGVGPNTMAAGGGAPMADNNEGADGVGSSSGNWHCDSTWLGDRVITTSTRTWALPTYNNHLYKQISNGTSGGATNDNTYFGYSTPWGYFDFNRFHCHFSPRDWQRLINNNWGFRPKRLSFKLFNIQVKEVTQNEGTKTIANNLTSTIQVFTDSEYQLPYVLGSAHQGCLPPFPADVFMIPQYGYLTLNNGSQAVGRSSFYCLEYFPSQMLRTGNNFQFTYTFEDVPFHSSYAHSQSLDRLMNPLIDQYLYYLSRTQTTSNGRGVTLGFSQGGPNTMANQAKNWLPGPCYRQQRVSTTTGQNNNSNFAWTAGTKYHLNGRNSLANPGIAMATHKDDEERFFPSNGILIFGKQNAARDNADYSDVMLTSEEEIKTTNPVATEEYGIVADNLQQQNTAPQIGTVNSQGALPGMVWQNRDVYLQGPIWAKIPHTDGNFHPSPLMGGFGLKHPPPQILIKNTPVPADPPTTFNQSKLNSFITQYSTGQVSVEIEWELQKENSKRWNPEIQYTSNYYKSTSVDFAVNTEGVYSEPRPIGTRYLTRNL

SEQ ID NO: 19 - protein, 738 aa, Artificial Sequence
  AAV capsid variant
MAADGYLPDWLEDNLSEGIREWWALKPGAPKPKANQQKQDDGRGLVLPGYKYLGPFNGLDKGEPVNAADAAALEHDKAYDQQLQAGDNPYLRYNHADAEFQERLQEDTSFGGNLGRAVFQAKKRVLEPLGLVEEGAKTAPGKKRPVEPSPQRSPDSSTGIGKKGQQPARKRLNFGQTGDSESVPDPQPLGEPPAAPSGVGPNTMAAGGGAPMADNNEGADGVGSSSGNWHCDSTWLGDRVITTSTRTWALPTYNNHLYKQISNGTSGGATNDNTYFGYSTPWGYFDFNRFHCHFSPRDWQRLINNNWGFRPKRLSFKLFNIQVKEVTQNEGTKTIANNLTSTIQVFTDSEYQLPYVLGSAHQGCLPPFPADVFMIPQYGYLTLNNGSQAVGRSSFYCLEYFPSQMLRTGNNFQFTYTFEDVPFHSSYAHSQSLDRLMNPLIDQYLYYLSRTQTTGGTANTQTLGFSQGGPNTMANQAKNWLPGPCYRQQRVSTNLAENFKYNFAWTAGTKYHLNGRNSLANPGIAMATHKDDEERFFPSNGILIFGKQNAARDNADYSDVMLTSEEEIKTTNPVATEEYGIVADNLQQQNTAPQIGTVNSQGALPGMVWQNRDVYLQGPIWAKIPHTDGNFHPSPLMGGFGLKHPPPQILIKNTPVPADPPTTFNQSKLNSFITQYSTGQVSVEIEWELQKENSKRWNPEIQYTSNYYKSTSVDFAVNTEGVYSEPRPIGTRYLTRNL

SEQ ID NO: 20 - protein, 738 aa, Artificial Sequence
  AAV capsid variant
MAADGYLPDWLEDNLSEGIREWWALKPGAPKPKANQQKQDDGRGLVLPGYKYLGPFNGLDKGEPVNAADAAALEHDKAYDQQLQAGDNPYLRYNHADAEFQERLQEDTSFGGNLGRAVFQAKKRVLEPLGLVEEGAKTAPGKKRPVEPSPQRSPDSSTGIGKKGQQPARKRLNFGQTGDSESVPDPQPLGEPPAAPSGVGPNTMAAGGGAPMADNNEGADGVGSSSGNWHCDSTWLGDRVITTSTRTWALPTYNNHLYKQISNGTSGGATNDNTYFGYSTPWGYFDFNRFHCHFSPRDWQRLINNNWGFRPKRLSFKLFNIQVKEVTQNEGTKTIANNLTSTIQVFTDSEYQLPYVLGSAHQGCLPPFPADVFMIPQYGYLTLNNGSQAVGRSSFYCLEYFPSQMLRTGNNFQFTYTFEDVPFHSSYAHSQSLDRLMNPLIDQYLYYLSRTQTTGGTANTQTLGFSQGGPNTMANQAKNWLPGPCYRQQRVSTVLSGDHSANFAWTAGTKYHLNGRNSLANPGIAMATHKDDEERFFPSNGILIFGKQNAARDNADYSDVMLTSEEEIKTTNPVATEEYGIVADNLQQQNTAPQIGTVNSQGALPGMVWQNRDVYLQGPIWAKIPHTDGNFHPSPLMGGFGLKHPPPQILIKNTPVPADPPTTFNQSKLNSFITQYSTGQVSVEIEWELQKENSKRWNPEIQYTSNYYKSTSVDFAVNTEGVYSEPRPIGTRYLTRNL

SEQ ID NO: 21 - protein, 738 aa, Artificial Sequence
  AAV capsid variant
MAADGYLPDWLEDNLSEGIREWWALKPGAPKPKANQQKQDDGRGLVLPGYKYLGPFNGLDKGEPVNAADAAALEHDKAYDQQLQAGDNPYLRYNHADAEFQERLQEDTSFGGNLGRAVFQAKKRVLEPLGLVEEGAKTAPGKKRPVEPSPQRSPDSSTGIGKKGQQPARKRLNFGQTGDSESVPDPQPLGEPPAAPSGVGPNTMAAGGGAPMADNNEGADGVGSSSGNWHCDSTWLGDRVITTSTRTWALPTYNNHLYKQISNGTSGGATNDNTYFGYSTPWGYFDFNRFHCHFSPRDWQRLINNNWGFRPKRLSFKLFNIQVKEVTQNEGTKTIANNLTSTIQVFTDSEYQLPYVLGSAHQGCLPPFPADVFMIPQYGYLTLNNGSQAVGRSSFYCLEYFPSQMLRTGNNFQFTYTFEDVPFHSSYAHSQSLDRLMNPLIDQYLYYLSRTQTTGGTANTQTLGFSQGGPNTMANQAKNWLPGPCYRQQRVSTMSAASGSGNFAWTAGTKYHLNGRNSLANPGIAMATHKDDEERFFPSNGILIFGKQNAARDNADYSDVMLTSEEEIKTTNPVATEEYGIVADNLQQQNTAPQIGTVNSQGALPGMVWQNRDVYLQGPIWAKIPHTDGNFHPSPLMGGFGLKHPPPQILIKNTPVPADPPTTFNQSKLNSFITQYSTGQVSVEIEWELQKENSKRWNPEIQYTSNYYKSTSVDFAVNTEGVYSEPRPIGTRYLTRNL

SEQ ID NO: 22 - protein, 738 aa, Artificial Sequence
  AAV capsid variant
MAADGYLPDWLEDNLSEGIREWWALKPGAPKPKANQQKQDDGRGLVLPGYKYLGPFNGLDKGEPVNAADAAALEHDKAYDQQLQAGDNPYLRYNHADAEFQERLQEDTSFGGNLGRAVFQAKKRVLEPLGLVEEGAKTAPGKKRPVEPSPQRSPDSSTGIGKKGQQPARKRLNFGQTGDSESVPDPQPLGEPPAAPSGVGPNTMAAGGGAPMADNNEGADGVGSSSGNWHCDSTWLGDRVITTSTRTWALPTYNNHLYKQISNGTSGGATNDNTYFGYSTPWGYFDFNRFHCHFSPRDWQRLINNNWGFRPKRLSFKLFNIQVKEVTQNEGTKTIANNLTSTIQVFTDSEYQLPYVLGSAHQGCLPPFPADVFMIPQYGYLTLNNGSQAVGRSSFYCLEYFPSQMLRTGNNFQFTYTFEDVPFHSSYAHSQSLDRLMNPLIDQYLYYLSRTQTTGGTANTQTLGFSQGGPNTMANQAKNWLPGPCYRQQRVSTGTNLGKEQNFAWTAGTKYHLNGRNSLANPGIAMATHKDDEERFFPSNGILIFGKQNAARDNADYSDVMLTSEEEIKTTNPVATEEYGIVADNLQQQNTAPQIGTVNSQGALPGMVWQNRDVYLQGPIWAKIPHTDGNFHPSPLMGGFGLKHPPPQILIKNTPVPADPPTTFNQSKLNSFITQYSTGQVSVEIEWELQKENSKRWNPEIQYTSNYYKSTSVDFAVNTEGVYSEPRPIGTRYLTRNL

SEQ ID NO: 23 - protein, 738 aa, Artificial Sequence
  AAV capsid variant
MAADGYLPDWLEDNLSEGIREWWALKPGAPKPKANQQKQDDGRGLVLPGYKYLGPFNGLDKGEPVNAADAAALEHDKAYDQQLQAGDNPYLRYNHADAEFQERLQEDTSFGGNLGRAVFQAKKRVLEPLGLVEEGAKTAPGKKRPVEPSPQRSPDSSTGIGKKGQQPARKRLNFGQTGDSESVPDPQPLGEPPAAPSGVGPNTMAAGGGAPMADNNEGADGVGSSSGNWHCDSTWLGDRVITTSTRTWALPTYNNHLYKQISNGTSGGATNDNTYFGYSTPWGYFDFNRFHCHFSPRDWQRLINNNWGFRPKRLSFKLFNIQVKEVTQNEGTKTIANNLTSTIQVFTDSEYQLPYVLGSAHQGCLPPFPADVFMIPQYGYLTLNNGSQAVGRSSFYCLEYFPSQMLRTGNNFQFTYTFEDVPFHSSYAHSQSLDRLMNPLIDQYLYYLSRTQTTGGTANTQTLGFSQGGPNTMANQAKNWLPGPCYRQQRVSTSSHSGTNQNFAWTAGTKYHLNGRNSLANPGIAMATHKDDEERFFPSNGILIFGKQNAARDNADYSDVMLTSEEEIKTTNPVATEEYGIVADNLQQQNTAPQIGTVNSQGALPGMVWQNRDVYLQGPIWAKIPHTDGNFHPSPLMGGFGLKHPPPQILIKNTPVPADPPTTFNQSKLNSFITQYSTGQVSVEIEWELQKENSKRWNPEIQYTSNYYKSTSVDFAVNTEGVYSEPRPIGTRYLTRNL

SEQ ID NO: 24 - protein, 738 aa, Artificial Sequence
  AAV capsid variant
MAADGYLPDWLEDNLSEGIREWWALKPGAPKPKANQQKQDDGRGLVLPGYKYLGPFNGLDKGEPVNAADAAALEHDKAYDQQLQAGDNPYLRYNHADAEFQERLQEDTSFGGNLGRAVFQAKKRVLEPLGLVEEGAKTAPGKKRPVEPSPQRSPDSSTGIGKKGQQPARKRLNFGQTGDSESVPDPQPLGEPPAAPSGVGPNTMAAGGGAPMADNNEGADGVGSSSGNWHCDSTWLGDRVITTSTRTWALPTYNNHLYKQISNGTSGGATNDNTYFGYSTPWGYFDFNRFHCHFSPRDWQRLINNNWGFRPKRLSFKLFNIQVKEVTQNEGTKTIANNLTSTIQVFTDSEYQLPYVLGSAHQGCLPPFPADVFMIPQYGYLTLNNGSQAVGRSSFYCLEYFPSQMLRTGNNFQFTYTFEDVPFHSSYAHSQSLDRLMNPLIDQYLYYLSRTQTTGGTANTQTLGFSQGGPNTMANQAKNWLPGPCYRQQRVSTVATRDGQLNFAWTAGTKYHLNGRNSLANPGIAMATHKDDEERFFPSNGILIFGKQNAARDNADYSDVMLTSEEEIKTTNPVATEEYGIVADNLQQQNTAPQIGTVNSQGALPGMVWQNRDVYLQGPIWAKIPHTDGNFHPSPLMGGFGLKHPPPQILIKNTPVPADPPTTFNQSKLNSFITQYSTGQVSVEIEWELQKENSKRWNPEIQYTSNYYKSTSVDFAVNTEGVYSEPRPIGTRYLTRNL

SEQ ID NO: 25 - protein, 738 aa, Artificial Sequence
  AAV capsid variant
MAADGYLPDWLEDNLSEGIREWWALKPGAPKPKANQQKQDDGRGLVLPGYKYLGPFNGLDKGEPVNAADAAALEHDKAYDQQLQAGDNPYLRYNHADAEFQERLQEDTSFGGNLGRAVFQAKKRVLEPLGLVEEGAKTAPGKKRPVEPSPQRSPDSSTGIGKKGQQPARKRLNFGQTGDSESVPDPQPLGEPPAAPSGVGPNTMAAGGGAPMADNNEGADGVGSSSGNWHCDSTWLGDRVITTSTRTWALPTYNNHLYKQISNGTSGGATNDNTYFGYSTPWGYFDFNRFHCHFSPRDWQRLINNNWGFRPKRLSFKLFNIQVKEVTQNEGTKTIANNLTSTIQVFTDSEYQLPYVLGSAHQGCLPPFPADVFMIPQYGYLTLNNGSQAVGRSSFYCLEYFPSQMLRTGNNFQFTYTFEDVPFHSSYAHSQSLDRLMNPLIDQYLYYLSRTQTTGGTANTQTLGFSQGGPNTMANQAKNWLPGPCYRQQRVSTALNADTGTNFAWTAGTKYHLNGRNSLANPGIAMATHKDDEERFFPSNGILIFGKQNAARDNADYSDVMLTSEEEIKTTNPVATEEYGIVADNLQQQNTAPQIGTVNSQGALPGMVWQNRDVYLQGPIWAKIPHTDGNFHPSPLMGGFGLKHPPPQILIKNTPVPADPPTTFNQSKLNSFITQYSTGQVSVEIEWELQKENSKRWNPEIQYTSNYYKSTSVDFAVNTEGVYSEPRPIGTRYLTRNL

SEQ ID NO: 26 - protein, 738 aa, Artificial Sequence
  AAV capsid variant
MAADGYLPDWLEDNLSEGIREWWALKPGAPKPKANQQKQDDGRGLVLPGYKYLGPFNGLDKGEPVNAADAAALEHDKAYDQQLQAGDNPYLRYNHADAEFQERLQEDTSFGGNLGRAVFQAKKRVLEPLGLVEEGAKTAPGKKRPVEPSPQRSPDSSTGIGKKGQQPARKRLNFGQTGDSESVPDPQPLGEPPAAPSGVGPNTMAAGGGAPMADNNEGADGVGSSSGNWHCDSTWLGDRVITTSTRTWALPTYNNHLYKQISNGTSGGATNDNTYFGYSTPWGYFDFNRFHCHFSPRDWQRLINNNWGFRPKRLSFKLFNIQVKEVTQNEGTKTIANNLTSTIQVFTDSEYQLPYVLGSAHQGCLPPFPADVFMIPQYGYLTLNNGSQAVGRSSFYCLEYFPSQMLRTGNNFQFTYTFEDVPFHSSYAHSQSLDRLMNPLIDQYLYYLSRTQTTGGTANTQTLGFSQGGPNTMANQAKNWLPGPCYRQQRVSTTTGQNNNSNFAWTAGTKYHLNGRNSLANPGIAMATHKDDEERFFPSNGILIFGKQNAARDNADYSDVMLTSEEEIKTTNPVATEEYGIVADNVMEPTRAPQIGTVNSQGALPGMVWQNRDVYLQGPIWAKIPHTDGNFHPSPLMGGFGLKHPPPQILIKNTPVPADPPTTFNQSKLNSFITQYSTGQVSVEIEWELQKENSKRWNPEIQYTSNYYKSTSVDFAVNTEGVYSEPRPIGTRYLTRNL

SEQ ID NO: 27 - protein, 737 aa, Artificial Sequence
  AAV capsid variant
MAADGYLPDWLEDNLSEGIREWWALKPGAPKPKANQQKQDDGRGLVLPGYKYLGPFNGLDKGEPVNAADAAALEHDKAYDQQLQAGDNPYLRYNHADAEFQERLQEDTSFGGNLGRAVFQAKKRVLEPLGLVEEGAKTAPGKKRPVEPSPQRSPDSSTGIGKKGQQPARKRLNFGQTGDSESVPDPQPLGEPPAAPSGVGPNTMAAGGGAPMADNNEGADGVGSSSGNWHCDSTWLGDRVITTSTRTWALPTYNNHLYKQISNGTSGGATNDNTYFGYSTPWGYFDFNRFHCHFSPRDWQRLINNNWGFRPKRLSFKLFNIQVKEVTQNEGTKTIANNLTSTIQVFTDSEYQLPYVLGSAHQGCLPPFPADVFMIPQYGYLTLNNGSQAVGRSSFYCLEYFPSQMLRTGNNFQFTYTFEDVPFHSSYAHSQSLDRLMNPLIDQYLYYLSRTQTTSNGRGVTLGFSQGGPNTMANQAKNWLPGPCYRQQRVSTTTGQNNNSNFAWTAGTKYHLNGRNSLANPGIAMATHKDDEERFFPSNGILIFGKQNAARDNADYSDVMLTSEEEIKTTNPVATEEYGIVADNVMEPTRAPQIGTVNSQGALPGMVWQNRDVYLQGPIWAKIPHTDGNFHPSPLMGGFGLKHPPPQILIKNTPVPADPPTTFNQSKLNSFITQYSTGQVSVEIEWELQKENSKRWNPEIQYTSNYYKSTSVDFAVNTEGVYSEPRPIGTRYLTRNL

SEQ ID NO: 28 - protein, 737 aa, Artificial Sequence
  AAV capsid variant
MAADGYLPDWLEDNLSEGIREWWALKPGAPKPKANQQKQDDGRGLVLPGYKYLGPFNGLDKGEPVNAADAAALEHDKAYDQQLQAGDNPYLRYNHADAEFQERLQEDTSFGGNLGRAVFQAKKRVLEPLGLVEEGAKTAPGKKRPVEPSPQRSPDSSTGIGKKGQQPARKRLNFGQTGDSESVPDPQPLGEPPAAPSGVGPNTMAAGGGAPMADNNEGADGVGSSSGNWHCDSTWLGDRVITTSTRTWALPTYNNHLYKQISNGTSGGATNDNTYFGYSTPWGYFDFNRFHCHFSPRDWQRLINNNWGFRPKRLSFKLFNIQVKEVTQNEGTKTIANNLTSTIQVFTDSEYQLPYVLGSAHQGCLPPFPADVFMIPQYGYLTLNNGSQAVGRSSFYCLEYFPSQMLRTGNNFQFTYTFEDVPFHSSYAHSQSLDRLMNPLIDQYLYYLSRTQTTSNGRGVTLGFSQGGPNTMANQAKNWLPGPCYRQQRVSTNLAENFKYNFAWTAGTKYHLNGRNSLANPGIAMATHKDDEERFFPSNGILIFGKQNAARDNADYSDVMLTSEEEIKTTNPVATEEYGIVADNLQQQNTAPQIGTVNSQGALPGMVWQNRDVYLQGPIWAKIPHTDGNFHPSPLMGGFGLKHPPPQILIKNTPVPADPPTTFNQSKLNSFITQYSTGQVSVEIEWELQKENSKRWNPEIQYTSNYYKSTSVDFAVNTEGVYSEPRPIGTRYLTRNL

SEQ ID NO: 29 - protein, 737 aa, Artificial Sequence
  AAV capsid variant
MAADGYLPDWLEDNLSEGIREWWALKPGAPKPKANQQKQDDGRGLVLPGYKYLGPFNGLDKGEPVNAADAAALEHDKAYDQQLQAGDNPYLRYNHADAEFQERLQEDTSFGGNLGRAVFQAKKRVLEPLGLVEEGAKTAPGKKRPVEPSPQRSPDSSTGIGKKGQQPARKRLNFGQTGDSESVPDPQPLGEPPAAPSGVGPNTMAAGGGAPMADNNEGADGVGSSSGNWHCDSTWLGDRVITTSTRTWALPTYNNHLYKQISNGTSGGATNDNTYFGYSTPWGYFDFNRFHCHFSPRDWQRLINNNWGFRPKRLSFKLFNIQVKEVTQNEGTKTIANNLTSTIQVFTDSEYQLPYVLGSAHQGCLPPFPADVFMIPQYGYLTLNNGSQAVGRSSFYCLEYFPSQMLRTGNNFQFTYTFEDVPFHSSYAHSQSLDRLMNPLIDQYLYYLSRTQTTSNGRGVTLGFSQGGPNTMANQAKNWLPGPCYRQQRVSTVLSGDHSANFAWTAGTKYHLNGRNSLANPGIAMATHKDDEERFFPSNGILIFGKQNAARDNADYSDVMLTSEEEIKTTNPVATEEYGIVADNLQQQNTAPQIGTVNSQGALPGMVWQNRDVYLQGPIWAKIPHTDGNFHPSPLMGGFGLKHPPPQILIKNTPVPADPPTTFNQSKLNSFITQYSTGQVSVEIEWELQKENSKRWNPEIQYTSNYYKSTSVDFAVNTEGVYSEPRPIGTRYLTRNL

SEQ ID NO: 30 - protein, 737 aa, Artificial Sequence
  AAV capsid variant
MAADGYLPDWLEDNLSEGIREWWALKPGAPKPKANQQKQDDGRGLVLPGYKYLGPFNGLDKGEPVNAADAAALEHDKAYDQQLQAGDNPYLRYNHADAEFQERLQEDTSFGGNLGRAVFQAKKRVLEPLGLVEEGAKTAPGKKRPVEPSPQRSPDSSTGIGKKGQQPARKRLNFGQTGDSESVPDPQPLGEPPAAPSGVGPNTMAAGGGAPMADNNEGADGVGSSSGNWHCDSTWLGDRVITTSTRTWALPTYNNHLYKQISNGTSGGATNDNTYFGYSTPWGYFDFNRFHCHFSPRDWQRLINNNWGFRPKRLSFKLFNIQVKEVTQNEGTKTIANNLTSTIQVFTDSEYQLPYVLGSAHQGCLPPFPADVFMIPQYGYLTLNNGSQAVGRSSFYCLEYFPSQMLRTGNNFQFTYTFEDVPFHSSYAHSQSLDRLMNPLIDQYLYYLSRTQTTSNGRGVTLGFSQGGPNTMANQAKNWLPGPCYRQQRVSTMSAASGSGNFAWTAGTKYHLNGRNSLANPGIAMATHKDDEERFFPSNGILIFGKQNAARDNADYSDVMLTSEEEIKTTNPVATEEYGIVADNLQQQNTAPQIGTVNSQGALPGMVWQNRDVYLQGPIWAKIPHTDGNFHPSPLMGGFGLKHPPPQILIKNTPVPADPPTTFNQSKLNSFITQYSTGQVSVEIEWELQKENSKRWNPEIQYTSNYYKSTSVDFAVNTEGVYSEPRPIGTRYLTRNL

SEQ ID NO: 31 - protein, 737 aa, Artificial Sequence
  AAV capsid variant
MAADGYLPDWLEDNLSEGIREWWALKPGAPKPKANQQKQDDGRGLVLPGYKYLGPFNGLDKGEPVNAADAAALEHDKAYDQQLQAGDNPYLRYNHADAEFQERLQEDTSFGGNLGRAVFQAKKRVLEPLGLVEEGAKTAPGKKRPVEPSPQRSPDSSTGIGKKGQQPARKRLNFGQTGDSESVPDPQPLGEPPAAPSGVGPNTMAAGGGAPMADNNEGADGVGSSSGNWHCDSTWLGDRVITTSTRTWALPTYNNHLYKQISNGTSGGATNDNTYFGYSTPWGYFDFNRFHCHFSPRDWQRLINNNWGFRPKRLSFKLFNIQVKEVTQNEGTKTIANNLTSTIQVFTDSEYQLPYVLGSAHQGCLPPFPADVFMIPQYGYLTLNNGSQAVGRSSFYCLEYFPSQMLRTGNNFQFTYTFEDVPFHSSYAHSQSLDRLMNPLIDQYLYYLSRTQTTSNGRGVTLGFSQGGPNTMANQAKNWLPGPCYRQQRVSTGTNLGKEQNFAWTAGTKYHLNGRNSLANPGIAMATHKDDEERFFPSNGILIFGKQNAARDNADYSDVMLTSEEEIKTTNPVATEEYGIVADNLQQQNTAPQIGTVNSQGALPGMVWQNRDVYLQGPIWAKIPHTDGNFHPSPLMGGFGLKHPPPQILIKNTPVPADPPTTFNQSKLNSFITQYSTGQVSVEIEWELQKENSKRWNPEIQYTSNYYKSTSVDFAVNTEGVYSEPRPIGTRYLTRNL

SEQ ID NO: 32 - protein, 737 aa, Artificial Sequence
  AAV capsid variant
MAADGYLPDWLEDNLSEGIREWWALKPGAPKPKANQQKQDDGRGLVLPGYKYLGPFNGLDKGEPVNAADAAALEHDKAYDQQLQAGDNPYLRYNHADAEFQERLQEDTSFGGNLGRAVFQAKKRVLEPLGLVEEGAKTAPGKKRPVEPSPQRSPDSSTGIGKKGQQPARKRLNFGQTGDSESVPDPQPLGEPPAAPSGVGPNTMAAGGGAPMADNNEGADGVGSSSGNWHCDSTWLGDRVITTSTRTWALPTYNNHLYKQISNGTSGGATNDNTYFGYSTPWGYFDFNRFHCHFSPRDWQRLINNNWGFRPKRLSFKLFNIQVKEVTQNEGTKTIANNLTSTIQVFTDSEYQLPYVLGSAHQGCLPPFPADVFMIPQYGYLTLNNGSQAVGRSSFYCLEYFPSQMLRTGNNFQFTYTFEDVPFHSSYAHSQSLDRLMNPLIDQYLYYLSRTQTTSNGRGVTLGFSQGGPNTMANQAKNWLPGPCYRQQRVSTSSHSGTNQNFAWTAGTKYHLNGRNSLANPGIAMATHKDDEERFFPSNGILIFGKQNAARDNADYSDVMLTSEEEIKTTNPVATEEYGIVADNLQQQNTAPQIGTVNSQGALPGMVWQNRDVYLQGPIWAKIPHTDGNFHPSPLMGGFGLKHPPPQILIKNTPVPADPPTTFNQSKLNSFITQYSTGQVSVEIEWELQKENSKRWNPEIQYTSNYYKSTSVDFAVNTEGVYSEPRPIGTRYLTRNL

SEQ ID NO: 33 - protein, 737 aa, Artificial Sequence
  AAV capsid variant
MAADGYLPDWLEDNLSEGIREWWALKPGAPKPKANQQKQDDGRGLVLPGYKYLGPFNGLDKGEPVNAADAAALEHDKAYDQQLQAGDNPYLRYNHADAEFQERLQEDTSFGGNLGRAVFQAKKRVLEPLGLVEEGAKTAPGKKRPVEPSPQRSPDSSTGIGKKGQQPARKRLNFGQTGDSESVPDPQPLGEPPAAPSGVGPNTMAAGGGAPMADNNEGADGVGSSSGNWHCDSTWLGDRVITTSTRTWALPTYNNHLYKQISNGTSGGATNDNTYFGYSTPWGYFDFNRFHCHFSPRDWQRLINNNWGFRPKRLSFKLFNIQVKEVTQNEGTKTIANNLTSTIQVFTDSEYQLPYVLGSAHQGCLPPFPADVFMIPQYGYLTLNNGSQAVGRSSFYCLEYFPSQMLRTGNNFQFTYTFEDVPFHSSYAHSQSLDRLMNPLIDQYLYYLSRTQTTSNGRGVTLGFSQGGPNTMANQAKNWLPGPCYRQQRVSTVATRDGQLNFAWTAGTKYHLNGRNSLANPGIAMATHKDDEERFFPSNGILIFGKQNAARDNADYSDVMLTSEEEIKTTNPVATEEYGIVADNLQQQNTAPQIGTVNSQGALPGMVWQNRDVYLQGPIWAKIPHTDGNFHPSPLMGGFGLKHPPPQILIKNTPVPADPPTTFNQSKLNSFITQYSTGQVSVEIEWELQKENSKRWNPEIQYTSNYYKSTSVDFAVNTEGVYSEPRPIGTRYLTRNL

SEQ ID NO: 34 - protein, 737 aa, Artificial Sequence
  AAV capsid variant
MAADGYLPDWLEDNLSEGIREWWALKPGAPKPKANQQKQDDGRGLVLPGYKYLGPFNGLDKGEPVNAADAAALEHDKAYDQQLQAGDNPYLRYNHADAEFQERLQEDTSFGGNLGRAVFQAKKRVLEPLGLVEEGAKTAPGKKRPVEPSPQRSPDSSTGIGKKGQQPARKRLNFGQTGDSESVPDPQPLGEPPAAPSGVGPNTMAAGGGAPMADNNEGADGVGSSSGNWHCDSTWLGDRVITTSTRTWALPTYNNHLYKQISNGTSGGATNDNTYFGYSTPWGYFDFNRFHCHFSPRDWQRLINNNWGFRPKRLSFKLFNIQVKEVTQNEGTKTIANNLTSTIQVFTDSEYQLPYVLGSAHQGCLPPFPADVFMIPQYGYLTLNNGSQAVGRSSFYCLEYFPSQMLRTGNNFQFTYTFEDVPFHSSYAHSQSLDRLMNPLIDQYLYYLSRTQTTSNGRGVTLGFSQGGPNTMANQAKNWLPGPCYRQQRVSTALNADTGTNFAWTAGTKYHLNGRNSLANPGIAMATHKDDEERFFPSNGILIFGKQNAARDNADYSDVMLTSEEEIKTTNPVATEEYGIVADNLQQQNTAPQIGTVNSQGALPGMVWQNRDVYLQGPIWAKIPHTDGNFHPSPLMGGFGLKHPPPQILIKNTPVPADPPTTFNQSKLNSFITQYSTGQVSVEIEWELQKENSKRWNPEIQYTSNYYKSTSVDFAVNTEGVYSEPRPIGTRYLTRNL

SEQ ID NO: 35 - protein, 738 aa, Artificial Sequence
  AAV capsid variant
MAADGYLPDWLEDNLSEGIREWWALKPGAPKPKANQQKQDDGRGLVLPGYKYLGPFNGLDKGEPVNAADAAALEHDKAYDQQLQAGDNPYLRYNHADAEFQERLQEDTSFGGNLGRAVFQAKKRVLEPLGLVEEGAKTAPGKKRPVEPSPQRSPDSSTGIGKKGQQPARKRLNFGQTGDSESVPDPQPLGEPPAAPSGVGPNTMAAGGGAPMADNNEGADGVGSSSGNWHCDSTWLGDRVITTSTRTWALPTYNNHLYKQISNGTSGGATNDNTYFGYSTPWGYFDFNRFHCHFSPRDWQRLINNNWGFRPKRLSFKLFNIQVKEVTQNEGTKTIANNLTSTIQVFTDSEYQLPYVLGSAHQGCLPPFPADVFMIPQYGYLTLNNGSQAVGRSSFYCLEYFPSQMLRTGNNFQFTYTFEDVPFHSSYAHSQSLDRLMNPLIDQYLYYLSRTQTTGGTANTQTLGFSQGGPNTMANQAKNWLPGPCYRQQRVSTNLAENFKYNFAWTAGTKYHLNGRNSLANPGIAMATHKDDEERFFPSNGILIFGKQNAARDNADYSDVMLTSEEEIKTTNPVATEEYGIVADNVMEPTRAPQIGTVNSQGALPGMVWQNRDVYLQGPIWAKIPHTDGNFHPSPLMGGFGLKHPPPQILIKNTPVPADPPTTFNQSKLNSFITQYSTGQVSVEIEWELQKENSKRWNPEIQYTSNYYKSTSVDFAVNTEGVYSEPRPIGTRYLTRNL

SEQ ID NO: 36 - protein, 738 aa, Artificial Sequence
  AAV capsid variant
MAADGYLPDWLEDNLSEGIREWWALKPGAPKPKANQQKQDDGRGLVLPGYKYLGPFNGLDKGEPVNAADAAALEHDKAYDQQLQAGDNPYLRYNHADAEFQERLQEDTSFGGNLGRAVFQAKKRVLEPLGLVEEGAKTAPGKKRPVEPSPQRSPDSSTGIGKKGQQPARKRLNFGQTGDSESVPDPQPLGEPPAAPSGVGPNTMAAGGGAPMADNNEGADGVGSSSGNWHCDSTWLGDRVITTSTRTWALPTYNNHLYKQISNGTSGGATNDNTYFGYSTPWGYFDFNRFHCHFSPRDWQRLINNNWGFRPKRLSFKLFNIQVKEVTQNEGTKTIANNLTSTIQVFTDSEYQLPYVLGSAHQGCLPPFPADVFMIPQYGYLTLNNGSQAVGRSSFYCLEYFPSQMLRTGNNFQFTYTFEDVPFHSSYAHSQSLDRLMNPLIDQYLYYLSRTQTTGGTANTQTLGFSQGGPNTMANQAKNWLPGPCYRQQRVSTVLSGDHSANFAWTAGTKYHLNGRNSLANPGIAMATHKDDEERFFPSNGILIFGKQNAARDNADYSDVMLTSEEEIKTTNPVATEEYGIVADNVMEPTRAPQIGTVNSQGALPGMVWQNRDVYLQGPIWAKIPHTDGNFHPSPLMGGFGLKHPPPQILIKNTPVPADPPTTFNQSKLNSFITQYSTGQVSVEIEWELQKENSKRWNPEIQYTSNYYKSTSVDFAVNTEGVYSEPRPIGTRYLTRNL

SEQ ID NO: 37 - protein, 738 aa, Artificial Sequence
  AAV capsid variant
MAADGYLPDWLEDNLSEGIREWWALKPGAPKPKANQQKQDDGRGLVLPGYKYLGPFNGLDKGEPVNAADAAALEHDKAYDQQLQAGDNPYLRYNHADAEFQERLQEDTSFGGNLGRAVFQAKKRVLEPLGLVEEGAKTAPGKKRPVEPSPQRSPDSSTGIGKKGQQPARKRLNFGQTGDSESVPDPQPLGEPPAAPSGVGPNTMAAGGGAPMADNNEGADGVGSSSGNWHCDSTWLGDRVITTSTRTWALPTYNNHLYKQISNGTSGGATNDNTYFGYSTPWGYFDFNRFHCHFSPRDWQRLINNNWGFRPKRLSFKLFNIQVKEVTQNEGTKTIANNLTSTIQVFTDSEYQLPYVLGSAHQGCLPPFPADVFMIPQYGYLTLNNGSQAVGRSSFYCLEYFPSQMLRTGNNFQFTYTFEDVPFHSSYAHSQSLDRLMNPLIDQYLYYLSRTQTTGGTANTQTLGFSQGGPNTMANQAKNWLPGPCYRQQRVSTMSAASGSGNFAWTAGTKYHLNGRNSLANPGIAMATHKDDEERFFPSNGILIFGKQNAARDNADYSDVMLTSEEEIKTTNPVATEEYGIVADNVMEPTRAPQIGTVNSQGALPGMVWQNRDVYLQGPIWAKIPHTDGNFHPSPLMGGFGLKHPPPQILIKNTPVPADPPTTFNQSKLNSFITQYSTGQVSVEIEWELQKENSKRWNPEIQYTSNYYKSTSVDFAVNTEGVYSEPRPIGTRYLTRNL

SEQ ID NO: 38 - protein, 738 aa, Artificial Sequence
  AAV capsid variant
MAADGYLPDWLEDNLSEGIREWWALKPGAPKPKANQQKQDDGRGLVLPGYKYLGPFNGLDKGEPVNAADAAALEHDKAYDQQLQAGDNPYLRYNHADAEFQERLQEDTSFGGNLGRAVFQAKKRVLEPLGLVEEGAKTAPGKKRPVEPSPQRSPDSSTGIGKKGQQPARKRLNFGQTGDSESVPDPQPLGEPPAAPSGVGPNTMAAGGGAPMADNNEGADGVGSSSGNWHCDSTWLGDRVITTSTRTWALPTYNNHLYKQISNGTSGGATNDNTYFGYSTPWGYFDFNRFHCHFSPRDWQRLINNNWGFRPKRLSFKLFNIQVKEVTQNEGTKTIANNLTSTIQVFTDSEYQLPYVLGSAHQGCLPPFPADVFMIPQYGYLTLNNGSQAVGRSSFYCLEYFPSQMLRTGNNFQFTYTFEDVPFHSSYAHSQSLDRLMNPLIDQYLYYLSRTQTTGGTANTQTLGFSQGGPNTMANQAKNWLPGPCYRQQRVSTGTNLGKEQNFAWTAGTKYHLNGRNSLANPGIAMATHKDDEERFFPSNGILIFGKQNAARDNADYSDVMLTSEEEIKTTNPVATEEYGIVADNVMEPTRAPQIGTVNSQGALPGMVWQNRDVYLQGPIWAKIPHTDGNFHPSPLMGGFGLKHPPPQILIKNTPVPADPPTTFNQSKLNSFITQYSTGQVSVEIEWELQKENSKRWNPEIQYTSNYYKSTSVDFAVNTEGVYSEPRPIGTRYLTRNL

SEQ ID NO: 39 - protein, 738 aa, Artificial Sequence
  AAV capsid variant
MAADGYLPDWLEDNLSEGIREWWALKPGAPKPKANQQKQDDGRGLVLPGYKYLGPFNGLDKGEPVNAADAAALEHDKAYDQQLQAGDNPYLRYNHADAEFQERLQEDTSFGGNLGRAVFQAKKRVLEPLGLVEEGAKTAPGKKRPVEPSPQRSPDSSTGIGKKGQQPARKRLNFGQTGDSESVPDPQPLGEPPAAPSGVGPNTMAAGGGAPMADNNEGADGVGSSSGNWHCDSTWLGDRVITTSTRTWALPTYNNHLYKQISNGTSGGATNDNTYFGYSTPWGYFDFNRFHCHFSPRDWQRLINNNWGFRPKRLSFKLFNIQVKEVTQNEGTKTIANNLTSTIQVFTDSEYQLPYVLGSAHQGCLPPFPADVFMIPQYGYLTLNNGSQAVGRSSFYCLEYFPSQMLRTGNNFQFTYTFEDVPFHSSYAHSQSLDRLMNPLIDQYLYYLSRTQTTGGTANTQTLGFSQGGPNTMANQAKNWLPGPCYRQQRVSTSSHSGTNQNFAWTAGTKYHLNGRNSLANPGIAMATHKDDEERFFPSNGILIFGKQNAARDNADYSDVMLTSEEEIKTTNPVATEEYGIVADNVMEPTRAPQIGTVNSQGALPGMVWQNRDVYLQGPIWAKIPHTDGNFHPSPLMGGFGLKHPPPQILIKNTPVPADPPTTFNQSKLNSFITQYSTGQVSVEIEWELQKENSKRWNPEIQYTSNYYKSTSVDFAVNTEGVYSEPRPIGTRYLTRNL

SEQ ID NO: 40 - protein, 738 aa, Artificial Sequence
  AAV capsid variant
MAADGYLPDWLEDNLSEGIREWWALKPGAPKPKANQQKQDDGRGLVLPGYKYLGPFNGLDKGEPVNAADAAALEHDKAYDQQLQAGDNPYLRYNHADAEFQERLQEDTSFGGNLGRAVFQAKKRVLEPLGLVEEGAKTAPGKKRPVEPSPQRSPDSSTGIGKKGQQPARKRLNFGQTGDSESVPDPQPLGEPPAAPSGVGPNTMAAGGGAPMADNNEGADGVGSSSGNWHCDSTWLGDRVITTSTRTWALPTYNNHLYKQISNGTSGGATNDNTYFGYSTPWGYFDFNRFHCHFSPRDWQRLINNNWGFRPKRLSFKLFNIQVKEVTQNEGTKTIANNLTSTIQVFTDSEYQLPYVLGSAHQGCLPPFPADVFMIPQYGYLTLNNGSQAVGRSSFYCLEYFPSQMLRTGNNFQFTYTFEDVPFHSSYAHSQSLDRLMNPLIDQYLYYLSRTQTTGGTANTQTLGFSQGGPNTMANQAKNWLPGPCYRQQRVSTVATRDGQLNFAWTAGTKYHLNGRNSLANPGIAMATHKDDEERFFPSNGILIFGKQNAARDNADYSDVMLTSEEEIKTTNPVATEEYGIVADNVMEPTRAPQIGTVNSQGALPGMVWQNRDVYLQGPIWAKIPHTDGNFHPSPLMGGFGLKHPPPQILIKNTPVPADPPTTFNQSKLNSFITQYSTGQVSVEIEWELQKENSKRWNPEIQYTSNYYKSTSVDFAVNTEGVYSEPRPIGTRYLTRNL

SEQ ID NO: 41 - protein, 738 aa, Artificial Sequence
  AAV capsid variant
MAADGYLPDWLEDNLSEGIREWWALKPGAPKPKANQQKQDDGRGLVLPGYKYLGPFNGLDKGEPVNAADAAALEHDKAYDQQLQAGDNPYLRYNHADAEFQERLQEDTSFGGNLGRAVFQAKKRVLEPLGLVEEGAKTAPGKKRPVEPSPQRSPDSSTGIGKKGQQPARKRLNFGQTGDSESVPDPQPLGEPPAAPSGVGPNTMAAGGGAPMADNNEGADGVGSSSGNWHCDSTWLGDRVITTSTRTWALPTYNNHLYKQISNGTSGGATNDNTYFGYSTPWGYFDFNRFHCHFSPRDWQRLINNNWGFRPKRLSFKLFNIQVKEVTQNEGTKTIANNLTSTIQVFTDSEYQLPYVLGSAHQGCLPPFPADVFMIPQYGYLTLNNGSQAVGRSSFYCLEYFPSQMLRTGNNFQFTYTFEDVPFHSSYAHSQSLDRLMNPLIDQYLYYLSRTQTTGGTANTQTLGFSQGGPNTMANQAKNWLPGPCYRQQRVSTALNADTGTNFAWTAGTKYHLNGRNSLANPGIAMATHKDDEERFFPSNGILIFGKQNAARDNADYSDVMLTSEEEIKTTNPVATEEYGIVADNVMEPTRAPQIGTVNSQGALPGMVWQNRDVYLQGPIWAKIPHTDGNFHPSPLMGGFGLKHPPPQILIKNTPVPADPPTTFNQSKLNSFITQYSTGQVSVEIEWELQKENSKRWNPEIQYTSNYYKSTSVDFAVNTEGVYSEPRPIGTRYLTRNL

SEQ ID NO: 42 - protein, 737 aa, Artificial Sequence
  AAV capsid variant
MAADGYLPDWLEDNLSEGIREWWALKPGAPKPKANQQKQDDGRGLVLPGYKYLGPFNGLDKGEPVNAADAAALEHDKAYDQQLQAGDNPYLRYNHADAEFQERLQEDTSFGGNLGRAVFQAKKRVLEPLGLVEEGAKTAPGKKRPVEPSPQRSPDSSTGIGKKGQQPARKRLNFGQTGDSESVPDPQPLGEPPAAPSGVGPNTMAAGGGAPMADNNEGADGVGSSSGNWHCDSTWLGDRVITTSTRTWALPTYNNHLYKQISNGTSGGATNDNTYFGYSTPWGYFDFNRFHCHFSPRDWQRLINNNWGFRPKRLSFKLFNIQVKEVTQNEGTKTIANNLTSTIQVFTDSEYQLPYVLGSAHQGCLPPFPADVFMIPQYGYLTLNNGSQAVGRSSFYCLEYFPSQMLRTGNNFQFTYTFEDVPFHSSYAHSQSLDRLMNPLIDQYLYYLSRTQTTSNGRGVTLGFSQGGPNTMANQAKNWLPGPCYRQQRVSTNLAENFKYNFAWTAGTKYHLNGRNSLANPGIAMATHKDDEERFFPSNGILIFGKQNAARDNADYSDVMLTSEEEIKTTNPVATEEYGIVADNVMEPTRAPQIGTVNSQGALPGMVWQNRDVYLQGPIWAKIPHTDGNFHPSPLMGGFGLKHPPPQILIKNTPVPADPPTTFNQSKLNSFITQYSTGQVSVEIEWELQKENSKRWNPEIQYTSNYYKSTSVDFAVNTEGVYSEPRPIGTRYLTRNL

SEQ ID NO: 43 - protein, 737 aa, Artificial Sequence
  AAV capsid variant
MAADGYLPDWLEDNLSEGIREWWALKPGAPKPKANQQKQDDGRGLVLPGYKYLGPFNGLDKGEPVNAADAAALEHDKAYDQQLQAGDNPYLRYNHADAEFQERLQEDTSFGGNLGRAVFQAKKRVLEPLGLVEEGAKTAPGKKRPVEPSPQRSPDSSTGIGKKGQQPARKRLNFGQTGDSESVPDPQPLGEPPAAPSGVGPNTMAAGGGAPMADNNEGADGVGSSSGNWHCDSTWLGDRVITTSTRTWALPTYNNHLYKQISNGTSGGATNDNTYFGYSTPWGYFDFNRFHCHFSPRDWQRLINNNWGFRPKRLSFKLFNIQVKEVTQNEGTKTIANNLTSTIQVFTDSEYQLPYVLGSAHQGCLPPFPADVFMIPQYGYLTLNNGSQAVGRSSFYCLEYFPSQMLRTGNNFQFTYTFEDVPFHSSYAHSQSLDRLMNPLIDQYLYYLSRTQTTSNGRGVTLGFSQGGPNTMANQAKNWLPGPCYRQQRVSTVLSGDHSANFAWTAGTKYHLNGRNSLANPGIAMATHKDDEERFFPSNGILIFGKQNAARDNADYSDVMLTSEEEIKTTNPVATEEYGIVADNVMEPTRAPQIGTVNSQGALPGMVWQNRDVYLQGPIWAKIPHTDGNFHPSPLMGGFGLKHPPPQILIKNTPVPADPPTTFNQSKLNSFITQYSTGQVSVEIEWELQKENSKRWNPEIQYTSNYYKSTSVDFAVNTEGVYSEPRPIGTRYLTRNL

SEQ ID NO: 44 - protein, 737 aa, Artificial Sequence
  AAV capsid variant
MAADGYLPDWLEDNLSEGIREWWALKPGAPKPKANQQKQDDGRGLVLPGYKYLGPFNGLDKGEPVNAADAAALEHDKAYDQQLQAGDNPYLRYNHADAEFQERLQEDTSFGGNLGRAVFQAKKRVLEPLGLVEEGAKTAPGKKRPVEPSPQRSPDSSTGIGKKGQQPARKRLNFGQTGDSESVPDPQPLGEPPAAPSGVGPNTMAAGGGAPMADNNEGADGVGSSSGNWHCDSTWLGDRVITTSTRTWALPTYNNHLYKQISNGTSGGATNDNTYFGYSTPWGYFDFNRFHCHFSPRDWQRLINNNWGFRPKRLSFKLFNIQVKEVTQNEGTKTIANNLTSTIQVFTDSEYQLPYVLGSAHQGCLPPFPADVFMIPQYGYLTLNNGSQAVGRSSFYCLEYFPSQMLRTGNNFQFTYTFEDVPFHSSYAHSQSLDRLMNPLIDQYLYYLSRTQTTSNGRGVTLGFSQGGPNTMANQAKNWLPGPCYRQQRVSTMSAASGSGNFAWTAGTKYHLNGRNSLANPGIAMATHKDDEERFFPSNGILIFGKQNAARDNADYSDVMLTSEEEIKTTNPVATEEYGIVADNVMEPTRAPQIGTVNSQGALPGMVWQNRDVYLQGPIWAKIPHTDGNFHPSPLMGGFGLKHPPPQILIKNTPVPADPPTTFNQSKLNSFITQYSTGQVSVEIEWELQKENSKRWNPEIQYTSNYYKSTSVDFAVNTEGVYSEPRPIGTRYLTRNL

SEQ ID NO: 45 - protein, 737 aa, Artificial Sequence
  AAV capsid variant
MAADGYLPDWLEDNLSEGIREWWALKPGAPKPKANQQKQDDGRGLVLPGYKYLGPFNGLDKGEPVNAADAAALEHDKAYDQQLQAGDNPYLRYNHADAEFQERLQEDTSFGGNLGRAVFQAKKRVLEPLGLVEEGAKTAPGKKRPVEPSPQRSPDSSTGIGKKGQQPARKRLNFGQTGDSESVPDPQPLGEPPAAPSGVGPNTMAAGGGAPMADNNEGADGVGSSSGNWHCDSTWLGDRVITTSTRTWALPTYNNHLYKQISNGTSGGATNDNTYFGYSTPWGYFDFNRFHCHFSPRDWQRLINNNWGFRPKRLSFKLFNIQVKEVTQNEGTKTIANNLTSTIQVFTDSEYQLPYVLGSAHQGCLPPFPADVFMIPQYGYLTLNNGSQAVGRSSFYCLEYFPSQMLRTGNNFQFTYTFEDVPFHSSYAHSQSLDRLMNPLIDQYLYYLSRTQTTSNGRGVTLGFSQGGPNTMANQAKNWLPGPCYRQQRVSTGTNLGKEQNFAWTAGTKYHLNGRNSLANPGIAMATHKDDEERFFPSNGILIFGKQNAARDNADYSDVMLTSEEEIKTTNPVATEEYGIVADNVMEPTRAPQIGTVNSQGALPGMVWQNRDVYLQGPIWAKIPHTDGNFHPSPLMGGFGLKHPPPQILIKNTPVPADPPTTFNQSKLNSFITQYSTGQVSVEIEWELQKENSKRWNPEIQYTSNYYKSTSVDFAVNTEGVYSEPRPIGTRYLTRNL

SEQ ID NO: 46 - protein, 737 aa, Artificial Sequence
  AAV capsid variant
MAADGYLPDWLEDNLSEGIREWWALKPGAPKPKANQQKQDDGRGLVLPGYKYLGPFNGLDKGEPVNAADAAALEHDKAYDQQLQAGDNPYLRYNHADAEFQERLQEDTSFGGNLGRAVFQAKKRVLEPLGLVEEGAKTAPGKKRPVEPSPQRSPDSSTGIGKKGQQPARKRLNFGQTGDSESVPDPQPLGEPPAAPSGVGPNTMAAGGGAPMADNNEGADGVGSSSGNWHCDSTWLGDRVITTSTRTWALPTYNNHLYKQISNGTSGGATNDNTYFGYSTPWGYFDFNRFHCHFSPRDWQRLINNNWGFRPKRLSFKLFNIQVKEVTQNEGTKTIANNLTSTIQVFTDSEYQLPYVLGSAHQGCLPPFPADVFMIPQYGYLTLNNGSQAVGRSSFYCLEYFPSQMLRTGNNFQFTYTFEDVPFHSSYAHSQSLDRLMNPLIDQYLYYLSRTQTTSNGRGVTLGFSQGGPNTMANQAKNWLPGPCYRQQRVSTSSHSGTNQNFAWTAGTKYHLNGRNSLANPGIAMATHKDDEERFFPSNGILIFGKQNAARDNADYSDVMLTSEEEIKTTNPVATEEYGIVADNVMEPTRAPQIGTVNSQGALPGMVWQNRDVYLQGPIWAKIPHTDGNFHPSPLMGGFGLKHPPPQILIKNTPVPADPPTTFNQSKLNSFITQYSTGQVSVEIEWELQKENSKRWNPEIQYTSNYYKSTSVDFAVNTEGVYSEPRPIGTRYLTRNL

SEQ ID NO: 47 - protein, 737 aa, Artificial Sequence
  AAV capsid variant
MAADGYLPDWLEDNLSEGIREWWALKPGAPKPKANQQKQDDGRGLVLPGYKYLGPFNGLDKGEPVNAADAAALEHDKAYDQQLQAGDNPYLRYNHADAEFQERLQEDTSFGGNLGRAVFQAKKRVLEPLGLVEEGAKTAPGKKRPVEPSPQRSPDSSTGIGKKGQQPARKRLNFGQTGDSESVPDPQPLGEPPAAPSGVGPNTMAAGGGAPMADNNEGADGVGSSSGNWHCDSTWLGDRVITTSTRTWALPTYNNHLYKQISNGTSGGATNDNTYFGYSTPWGYFDFNRFHCHFSPRDWQRLINNNWGFRPKRLSFKLFNIQVKEVTQNEGTKTIANNLTSTIQVFTDSEYQLPYVLGSAHQGCLPPFPADVFMIPQYGYLTLNNGSQAVGRSSFYCLEYFPSQMLRTGNNFQFTYTFEDVPFHSSYAHSQSLDRLMNPLIDQYLYYLSRTQTTSNGRGVTLGFSQGGPNTMANQAKNWLPGPCYRQQRVSTVATRDGQLNFAWTAGTKYHLNGRNSLANPGIAMATHKDDEERFFPSNGILIFGKQNAARDNADYSDVMLTSEEEIKTTNPVATEEYGIVADNVMEPTRAPQIGTVNSQGALPGMVWQNRDVYLQGPIWAKIPHTDGNFHPSPLMGGFGLKHPPPQILIKNTPVPADPPTTFNQSKLNSFITQYSTGQVSVEIEWELQKENSKRWNPEIQYTSNYYKSTSVDFAVNTEGVYSEPRPIGTRYLTRNL

SEQ ID NO: 48 - protein, 737 aa, Artificial Sequence
  AAV capsid variant
MAADGYLPDWLEDNLSEGIREWWALKPGAPKPKANQQKQDDGRGLVLPGYKYLGPFNGLDKGEPVNAADAAALEHDKAYDQQLQAGDNPYLRYNHADAEFQERLQEDTSFGGNLGRAVFQAKKRVLEPLGLVEEGAKTAPGKKRPVEPSPQRSPDSSTGIGKKGQQPARKRLNFGQTGDSESVPDPQPLGEPPAAPSGVGPNTMAAGGGAPMADNNEGADGVGSSSGNWHCDSTWLGDRVITTSTRTWALPTYNNHLYKQISNGTSGGATNDNTYFGYSTPWGYFDFNRFHCHFSPRDWQRLINNNWGFRPKRLSFKLFNIQVKEVTQNEGTKTIANNLTSTIQVFTDSEYQLPYVLGSAHQGCLPPFPADVFMIPQYGYLTLNNGSQAVGRSSFYCLEYFPSQMLRTGNNFQFTYTFEDVPFHSSYAHSQSLDRLMNPLIDQYLYYLSRTQTTSNGRGVTLGFSQGGPNTMANQAKNWLPGPCYRQQRVSTALNADTGTNFAWTAGTKYHLNGRNSLANPGIAMATHKDDEERFFPSNGILIFGKQNAARDNADYSDVMLTSEEEIKTTNPVATEEYGIVADNVMEPTRAPQIGTVNSQGALPGMVWQNRDVYLQGPIWAKIPHTDGNFHPSPLMGGFGLKHPPPQILIKNTPVPADPPTTFNQSKLNSFITQYSTGQVSVEIEWELQKENSKRWNPEIQYTSNYYKSTSVDFAVNTEGVYSEPRPIGTRYLTRNL

SEQ ID NO: 49 - protein, 737 aa, Artificial Sequence
  AAV capsid variant
MAADGYLPDWLEDNLSEGIREWWALKPGAPQPKANQQHQDNARGLVLPGYKYLGPGNGLDKGEPVNAADAAALEHDKAYDQQLKAGDNPYLKYNHADAEFQERLKEDTSFGGNLGRAVFQAKKRLLEPLGLVEEAAKTAPGKKRPVEQSPQEPDSSAGIGKSGAQPAKKRLNFGQTGDSESVPDPQPLGEPPAAPSGVGPNTMAAGGGAPMADNNEGADGVGSSSGNWHCDSTWLGDRVITTSTRTWALPTYNNHLYKQISNGTSGGATNDNTYFGYSTPWGYFDFNRFHCHFSPRDWQRLINNNWGFRPKRLSFKLFNIQVKEVTQNEGTKTIANNLTSTIQVFTDSEYQLPYVLGSAHQGCLPPFPADVFMIPQYGYLTLNNGSQAVGRSSFYCLEYFPSQMLRTGNNFQFTYTFEDVPFHSSYAHSQSLDRLMNPLIDQYLYYLSRTQTTGGTANTQTLGFSQGGPNTMANQAKNWLPGPCYRQQRVSTTTGQNNNSNFAWTAGTKYHLNGRNSLANPGIAMATHKDDEERFFPSNGILIFGKQNAARDNADYSDVMLTSEEEIKTTNPVATEEYGIVADNLQQQNTAPQIGTVNSQGALPGMVWQNRDVYLQGPIWAKIPHTDGNFHPSPLMGGFGLKHPPPQILIKNTPVPADPPTTFNQSKLNSFITQYSTGQVSVEIEWELQKENSKRWNPEIQYTSNYYKSTSVDFAVNTEGVYSEPRPIGTRYLTRNL

SEQ ID NO: 50 - protein, 736 aa, Artificial Sequence
  AAV capsid variant
MAADGYLPDWLEDNLSEGIREWWALKPGAPQPKANQQHQDNARGLVLPGYKYLGPGNGLDKGEPVNAADAAALEHDKAYDQQLKAGDNPYLKYNHADAEFQERLKEDTSFGGNLGRAVFQAKKRLLEPLGLVEEAAKTAPGKKRPVEQSPQEPDSSAGIGKSGAQPAKKRLNFGQTGDSESVPDPQPLGEPPAAPSGVGPNTMAAGGGAPMADNNEGADGVGSSSGNWHCDSTWLGDRVITTSTRTWALPTYNNHLYKQISNGTSGGATNDNTYFGYSTPWGYFDFNRFHCHFSPRDWQRLINNNWGFRPKRLSFKLFNIQVKEVTQNEGTKTIANNLTSTIQVFTDSEYQLPYVLGSAHQGCLPPFPADVFMIPQYGYLTLNNGSQAVGRSSFYCLEYFPSQMLRTGNNFQFTYTFEDVPFHSSYAHSQSLDRLMNPLIDQYLYYLSRTQTTSNGRGVTLGFSQGGPNTMANQAKNWLPGPCYRQQRVSTTTGQNNNSNFAWTAGTKYHLNGRNSLANPGIAMATHKDDEERFFPSNGILIFGKQNAARDNADYSDVMLTSEEEIKTTNPVATEEYGIVADNLQQQNTAPQIGTVNSQGALPGMVWQNRDVYLQGPIWAKIPHTDGNFHPSPLMGGFGLKHPPPQILIKNTPVPADPPTTFNQSKLNSFITQYSTGQVSVEIEWELQKENSKRWNPEIQYTSNYYKSTSVDFAVNTEGVYSEPRPIGTRYLTRNL

SEQ ID NO: 51 - protein, 737 aa, Artificial Sequence
  AAV capsid variant
MAADGYLPDWLEDNLSEGIREWWALKPGAPQPKANQQHQDNARGLVLPGYKYLGPGNGLDKGEPVNAADAAALEHDKAYDQQLKAGDNPYLKYNHADAEFQERLKEDTSFGGNLGRAVFQAKKRLLEPLGLVEEAAKTAPGKKRPVEQSPQEPDSSAGIGKSGAQPAKKRLNFGQTGDSESVPDPQPLGEPPAAPSGVGPNTMAAGGGAPMADNNEGADGVGSSSGNWHCDSTWLGDRVITTSTRTWALPTYNNHLYKQISNGTSGGATNDNTYFGYSTPWGYFDFNRFHCHFSPRDWQRLINNNWGFRPKRLSFKLFNIQVKEVTQNEGTKTIANNLTSTIQVFTDSEYQLPYVLGSAHQGCLPPFPADVFMIPQYGYLTLNNGSQAVGRSSFYCLEYFPSQMLRTGNNFQFTYTFEDVPFHSSYAHSQSLDRLMNPLIDQYLYYLSRTQTTGGTANTQTLGFSQGGPNTMANQAKNWLPGPCYRQQRVSTNLAENFKYNFAWTAGTKYHLNGRNSLANPGIAMATHKDDEERFFPSNGILIFGKQNAARDNADYSDVMLTSEEEIKTTNPVATEEYGIVADNLQQQNTAPQIGTVNSQGALPGMVWQNRDVYLQGPIWAKIPHTDGNFHPSPLMGGFGLKHPPPQILIKNTPVPADPPTTFNQSKLNSFITQYSTGQVSVEIEWELQKENSKRWNPEIQYTSNYYKSTSVDFAVNTEGVYSEPRPIGTRYLTRNL

SEQ ID NO: 52 - protein, 737 aa, Artificial Sequence
  AAV capsid variant
MAADGYLPDWLEDNLSEGIREWWALKPGAPQPKANQQHQDNARGLVLPGYKYLGPGNGLDKGEPVNAADAAALEHDKAYDQQLKAGDNPYLKYNHADAEFQERLKEDTSFGGNLGRAVFQAKKRLLEPLGLVEEAAKTAPGKKRPVEQSPQEPDSSAGIGKSGAQPAKKRLNFGQTGDSESVPDPQPLGEPPAAPSGVGPNTMAAGGGAPMADNNEGADGVGSSSGNWHCDSTWLGDRVITTSTRTWALPTYNNHLYKQISNGTSGGATNDNTYFGYSTPWGYFDFNRFHCHFSPRDWQRLINNNWGFRPKRLSFKLFNIQVKEVTQNEGTKTIANNLTSTIQVFTDSEYQLPYVLGSAHQGCLPPFPADVFMIPQYGYLTLNNGSQAVGRSSFYCLEYFPSQMLRTGNNFQFTYTFEDVPFHSSYAHSQSLDRLMNPLIDQYLYYLSRTQTTGGTANTQTLGFSQGGPNTMANQAKNWLPGPCYRQQRVSTVLSGDHSANFAWTAGTKYHLNGRNSLANPGIAMATHKDDEERFFPSNGILIFGKQNAARDNADYSDVMLTSEEEIKTTNPVATEEYGIVADNLQQQNTAPQIGTVNSQGALPGMVWQNRDVYLQGPIWAKIPHTDGNFHPSPLMGGFGLKHPPPQILIKNTPVPADPPTTFNQSKLNSFITQYSTGQVSVEIEWELQKENSKRWNPEIQYTSNYYKSTSVDFAVNTEGVYSEPRPIGTRYLTRNL

SEQ ID NO: 53 - protein, 737 aa, Artificial Sequence
  AAV capsid variant
MAADGYLPDWLEDNLSEGIREWWALKPGAPQPKANQQHQDNARGLVLPGYKYLGPGNGLDKGEPVNAADAAALEHDKAYDQQLKAGDNPYLKYNHADAEFQERLKEDTSFGGNLGRAVFQAKKRLLEPLGLVEEAAKTAPGKKRPVEQSPQEPDSSAGIGKSGAQPAKKRLNFGQTGDSESVPDPQPLGEPPAAPSGVGPNTMAAGGGAPMADNNEGADGVGSSSGNWHCDSTWLGDRVITTSTRTWALPTYNNHLYKQISNGTSGGATNDNTYFGYSTPWGYFDFNRFHCHFSPRDWQRLINNNWGFRPKRLSFKLFNIQVKEVTQNEGTKTIANNLTSTIQVFTDSEYQLPYVLGSAHQGCLPPFPADVFMIPQYGYLTLNNGSQAVGRSSFYCLEYFPSQMLRTGNNFQFTYTFEDVPFHSSYAHSQSLDRLMNPLIDQYLYYLSRTQTTGGTANTQTLGFSQGGPNTMANQAKNWLPGPCYRQQRVSTMSAASGSGNFAWTAGTKYHLNGRNSLANPGIAMATHKDDEERFFPSNGILIFGKQNAARDNADYSDVMLTSEEEIKTTNPVATEEYGIVADNLQQQNTAPQIGTVNSQGALPGMVWQNRDVYLQGPIWAKIPHTDGNFHPSPLMGGFGLKHPPPQILIKNTPVPADPPTTFNQSKLNSFITQYSTGQVSVEIEWELQKENSKRWNPEIQYTSNYYKSTSVDFAVNTEGVYSEPRPIGTRYLTRNL

SEQ ID NO: 54 - protein, 737 aa, Artificial Sequence
  AAV capsid variant
MAADGYLPDWLEDNLSEGIREWWALKPGAPQPKANQQHQDNARGLVLPGYKYLGPGNGLDKGEPVNAADAAALEHDKAYDQQLKAGDNPYLKYNHADAEFQERLKEDTSFGGNLGRAVFQAKKRLLEPLGLVEEAAKTAPGKKRPVEQSPQEPDSSAGIGKSGAQPAKKRLNFGQTGDSESVPDPQPLGEPPAAPSGVGPNTMAAGGGAPMADNNEGADGVGSSSGNWHCDSTWLGDRVITTSTRTWALPTYNNHLYKQISNGTSGGATNDNTYFGYSTPWGYFDFNRFHCHFSPRDWQRLINNNWGFRPKRLSFKLFNIQVKEVTQNEGTKTIANNLTSTIQVFTDSEYQLPYVLGSAHQGCLPPFPADVFMIPQYGYLTLNNGSQAVGRSSFYCLEYFPSQMLRTGNNFQFTYTFEDVPFHSSYAHSQSLDRLMNPLIDQYLYYLSRTQTTGGTANTQTLGFSQGGPNTMANQAKNWLPGPCYRQQRVSTGTNLGKEQNFAWTAGTKYHLNGRNSLANPGIAMATHKDDEERFFPSNGILIFGKQNAARDNADYSDVMLTSEEEIKTTNPVATEEYGIVADNLQQQNTAPQIGTVNSQGALPGMVWQNRDVYLQGPIWAKIPHTDGNFHPSPLMGGFGLKHPPPQILIKNTPVPADPPTTFNQSKLNSFITQYSTGQVSVEIEWELQKENSKRWNPEIQYTSNYYKSTSVDFAVNTEGVYSEPRPIGTRYLTRNL

SEQ ID NO: 55 - protein, 737 aa, Artificial Sequence
  AAV capsid variant
MAADGYLPDWLEDNLSEGIREWWALKPGAPQPKANQQHQDNARGLVLPGYKYLGPGNGLDKGEPVNAADAAALEHDKAYDQQLKAGDNPYLKYNHADAEFQERLKEDTSFGGNLGRAVFQAKKRLLEPLGLVEEAAKTAPGKKRPVEQSPQEPDSSAGIGKSGAQPAKKRLNFGQTGDSESVPDPQPLGEPPAAPSGVGPNTMAAGGGAPMADNNEGADGVGSSSGNWHCDSTWLGDRVITTSTRTWALPTYNNHLYKQISNGTSGGATNDNTYFGYSTPWGYFDFNRFHCHFSPRDWQRLINNNWGFRPKRLSFKLFNIQVKEVTQNEGTKTIANNLTSTIQVFTDSEYQLPYVLGSAHQGCLPPFPADVFMIPQYGYLTLNNGSQAVGRSSFYCLEYFPSQMLRTGNNFQFTYTFEDVPFHSSYAHSQSLDRLMNPLIDQYLYYLSRTQTTGGTANTQTLGFSQGGPNTMANQAKNWLPGPCYRQQRVSTSSHSGTNQNFAWTAGTKYHLNGRNSLANPGIAMATHKDDEERFFPSNGILIFGKQNAARDNADYSDVMLTSEEEIKTTNPVATEEYGIVADNLQQQNTAPQIGTVNSQGALPGMVWQNRDVYLQGPIWAKIPHTDGNFHPSPLMGGFGLKHPPPQILIKNTPVPADPPTTFNQSKLNSFITQYSTGQVSVEIEWELQKENSKRWNPEIQYTSNYYKSTSVDFAVNTEGVYSEPRPIGTRYLTRNL

SEQ ID NO: 56 - protein, 737 aa, Artificial Sequence
  AAV capsid variant
MAADGYLPDWLEDNLSEGIREWWALKPGAPQPKANQQHQDNARGLVLPGYKYLGPGNGLDKGEPVNAADAAALEHDKAYDQQLKAGDNPYLKYNHADAEFQERLKEDTSFGGNLGRAVFQAKKRLLEPLGLVEEAAKTAPGKKRPVEQSPQEPDSSAGIGKSGAQPAKKRLNFGQTGDSESVPDPQPLGEPPAAPSGVGPNTMAAGGGAPMADNNEGADGVGSSSGNWHCDSTWLGDRVITTSTRTWALPTYNNHLYKQISNGTSGGATNDNTYFGYSTPWGYFDFNRFHCHFSPRDWQRLINNNWGFRPKRLSFKLFNIQVKEVTQNEGTKTIANNLTSTIQVFTDSEYQLPYVLGSAHQGCLPPFPADVFMIPQYGYLTLNNGSQAVGRSSFYCLEYFPSQMLRTGNNFQFTYTFEDVPFHSSYAHSQSLDRLMNPLIDQYLYYLSRTQTTGGTANTQTLGFSQGGPNTMANQAKNWLPGPCYRQQRVSTVATRDGQLNFAWTAGTKYHLNGRNSLANPGIAMATHKDDEERFFPSNGILIFGKQNAARDNADYSDVMLTSEEEIKTTNPVATEEYGIVADNLQQQNTAPQIGTVNSQGALPGMVWQNRDVYLQGPIWAKIPHTDGNFHPSPLMGGFGLKHPPPQILIKNTPVPADPPTTFNQSKLNSFITQYSTGQVSVEIEWELQKENSKRWNPEIQYTSNYYKSTSVDFAVNTEGVYSEPRPIGTRYLTRNL

SEQ ID NO: 57 - protein, 737 aa, Artificial Sequence
  AAV capsid variant
MAADGYLPDWLEDNLSEGIREWWALKPGAPQPKANQQHQDNARGLVLPGYKYLGPGNGLDKGEPVNAADAAALEHDKAYDQQLKAGDNPYLKYNHADAEFQERLKEDTSFGGNLGRAVFQAKKRLLEPLGLVEEAAKTAPGKKRPVEQSPQEPDSSAGIGKSGAQPAKKRLNFGQTGDSESVPDPQPLGEPPAAPSGVGPNTMAAGGGAPMADNNEGADGVGSSSGNWHCDSTWLGDRVITTSTRTWALPTYNNHLYKQISNGTSGGATNDNTYFGYSTPWGYFDFNRFHCHFSPRDWQRLINNNWGFRPKRLSFKLFNIQVKEVTQNEGTKTIANNLTSTIQVFTDSEYQLPYVLGSAHQGCLPPFPADVFMIPQYGYLTLNNGSQAVGRSSFYCLEYFPSQMLRTGNNFQFTYTFEDVPFHSSYAHSQSLDRLMNPLIDQYLYYLSRTQTTGGTANTQTLGFSQGGPNTMANQAKNWLPGPCYRQQRVSTALNADTGTNFAWTAGTKYHLNGRNSLANPGIAMATHKDDEERFFPSNGILIFGKQNAARDNADYSDVMLTSEEEIKTTNPVATEEYGIVADNLQQQNTAPQIGTVNSQGALPGMVWQNRDVYLQGPIWAKIPHTDGNFHPSPLMGGFGLKHPPPQILIKNTPVPADPPTTFNQSKLNSFITQYSTGQVSVEIEWELQKENSKRWNPEIQYTSNYYKSTSVDFAVNTEGVYSEPRPIGTRYLTRNL

SEQ ID NO: 58 - protein, 737 aa, Artificial Sequence
  AAV capsid variant
MAADGYLPDWLEDNLSEGIREWWALKPGAPQPKANQQHQDNARGLVLPGYKYLGPGNGLDKGEPVNAADAAALEHDKAYDQQLKAGDNPYLKYNHADAEFQERLKEDTSFGGNLGRAVFQAKKRLLEPLGLVEEAAKTAPGKKRPVEQSPQEPDSSAGIGKSGAQPAKKRLNFGQTGDSESVPDPQPLGEPPAAPSGVGPNTMAAGGGAPMADNNEGADGVGSSSGNWHCDSTWLGDRVITTSTRTWALPTYNNHLYKQISNGTSGGATNDNTYFGYSTPWGYFDFNRFHCHFSPRDWQRLINNNWGFRPKRLSFKLFNIQVKEVTQNEGTKTIANNLTSTIQVFTDSEYQLPYVLGSAHQGCLPPFPADVFMIPQYGYLTLNNGSQAVGRSSFYCLEYFPSQMLRTGNNFQFTYTFEDVPFHSSYAHSQSLDRLMNPLIDQYLYYLSRTQTTGGTANTQTLGFSQGGPNTMANQAKNWLPGPCYRQQRVSTTTGQNNNSNFAWTAGTKYHLNGRNSLANPGIAMATHKDDEERFFPSNGILIFGKQNAARDNADYSDVMLTSEEEIKTTNPVATEEYGIVADNVMEPTRAPQIGTVNSQGALPGMVWQNRDVYLQGPIWAKIPHTDGNFHPSPLMGGFGLKHPPPQILIKNTPVPADPPTTFNQSKLNSFITQYSTGQVSVEIEWELQKENSKRWNPEIQYTSNYYKSTSVDFAVNTEGVYSEPRPIGTRYLTRNL

SEQ ID NO: 59 - protein, 736 aa, Artificial Sequence
  AAV capsid variant
MAADGYLPDWLEDNLSEGIREWWALKPGAPQPKANQQHQDNARGLVLPGYKYLGPGNGLDKGEPVNAADAAALEHDKAYDQQLKAGDNPYLKYNHADAEFQERLKEDTSFGGNLGRAVFQAKKRLLEPLGLVEEAAKTAPGKKRPVEQSPQEPDSSAGIGKSGAQPAKKRLNFGQTGDSESVPDPQPLGEPPAAPSGVGPNTMAAGGGAPMADNNEGADGVGSSSGNWHCDSTWLGDRVITTSTRTWALPTYNNHLYKQISNGTSGGATNDNTYFGYSTPWGYFDFNRFHCHFSPRDWQRLINNNWGFRPKRLSFKLFNIQVKEVTQNEGTKTIANNLTSTIQVFTDSEYQLPYVLGSAHQGCLPPFPADVFMIPQYGYLTLNNGSQAVGRSSFYCLEYFPSQMLRTGNNFQFTYTFEDVPFHSSYAHSQSLDRLMNPLIDQYLYYLSRTQTTSNGRGVTLGFSQGGPNTMANQAKNWLPGPCYRQQRVSTTTGQNNNSNFAWTAGTKYHLNGRNSLANPGIAMATHKDDEERFFPSNGILIFGKQNAARDNADYSDVMLTSEEEIKTTNPVATEEYGIVADNVMEPTRAPQIGTVNSQGALPGMVWQNRDVYLQGPIWAKIPHTDGNFHPSPLMGGFGLKHPPPQILIKNTPVPADPPTTFNQSKLNSFITQYSTGQVSVEIEWELQKENSKRWNPEIQYTSNYYKSTSVDFAVNTEGVYSEPRPIGTRYLTRNL

SEQ ID NO: 60 - protein, 736 aa, Artificial Sequence
  AAV capsid variant
MAADGYLPDWLEDNLSEGIREWWALKPGAPQPKANQQHQDNARGLVLPGYKYLGPGNGLDKGEPVNAADAAALEHDKAYDQQLKAGDNPYLKYNHADAEFQERLKEDTSFGGNLGRAVFQAKKRLLEPLGLVEEAAKTAPGKKRPVEQSPQEPDSSAGIGKSGAQPAKKRLNFGQTGDSESVPDPQPLGEPPAAPSGVGPNTMAAGGGAPMADNNEGADGVGSSSGNWHCDSTWLGDRVITTSTRTWALPTYNNHLYKQISNGTSGGATNDNTYFGYSTPWGYFDFNRFHCHFSPRDWQRLINNNWGFRPKRLSFKLFNIQVKEVTQNEGTKTIANNLTSTIQVFTDSEYQLPYVLGSAHQGCLPPFPADVFMIPQYGYLTLNNGSQAVGRSSFYCLEYFPSQMLRTGNNFQFTYTFEDVPFHSSYAHSQSLDRLMNPLIDQYLYYLSRTQTTSNGRGVTLGFSQGGPNTMANQAKNWLPGPCYRQQRVSTNLAENFKYNFAWTAGTKYHLNGRNSLANPGIAMATHKDDEERFFPSNGILIFGKQNAARDNADYSDVMLTSEEEIKTTNPVATEEYGIVADNLQQQNTAPQIGTVNSQGALPGMVWQNRDVYLQGPIWAKIPHTDGNFHPSPLMGGFGLKHPPPQILIKNTPVPADPPTTFNQSKLNSFITQYSTGQVSVEIEWELQKENSKRWNPEIQYTSNYYKSTSVDFAVNTEGVYSEPRPIGTRYLTRNL

SEQ ID NO: 61 - protein, 736 aa, Artificial Sequence
  AAV capsid variant
MAADGYLPDWLEDNLSEGIREWWALKPGAPQPKANQQHQDNARGLVLPGYKYLGPGNGLDKGEPVNAADAAALEHDKAYDQQLKAGDNPYLKYNHADAEFQERLKEDTSFGGNLGRAVFQAKKRLLEPLGLVEEAAKTAPGKKRPVEQSPQEPDSSAGIGKSGAQPAKKRLNFGQTGDSESVPDPQPLGEPPAAPSGVGPNTMAAGGGAPMADNNEGADGVGSSSGNWHCDSTWLGDRVITTSTRTWALPTYNNHLYKQISNGTSGGATNDNTYFGYSTPWGYFDFNRFHCHFSPRDWQRLINNNWGFRPKRLSFKLFNIQVKEVTQNEGTKTIANNLTSTIQVFTDSEYQLPYVLGSAHQGCLPPFPADVFMIPQYGYLTLNNGSQAVGRSSFYCLEYFPSQMLRTGNNFQFTYTFEDVPFHSSYAHSQSLDRLMNPLIDQYLYYLSRTQTTSNGRGVTLGFSQGGPNTMANQAKNWLPGPCYRQQRVSTVLSGDHSANFAWTAGTKYHLNGRNSLANPGIAMATHKDDEERFFPSNGILIFGKQNAARDNADYSDVMLTSEEEIKTTNPVATEEYGIVADNLQQQNTAPQIGTVNSQGALPGMVWQNRDVYLQGPIWAKIPHTDGNFHPSPLMGGFGLKHPPPQILIKNTPVPADPPTTFNQSKLNSFITQYSTGQVSVEIEWELQKENSKRWNPEIQYTSNYYKSTSVDFAVNTEGVYSEPRPIGTRYLTRNL

SEQ ID NO: 62 - protein, 736 aa, Artificial Sequence
  AAV capsid variant
MAADGYLPDWLEDNLSEGIREWWALKPGAPQPKANQQHQDNARGLVLPGYKYLGPGNGLDKGEPVNAADAAALEHDKAYDQQLKAGDNPYLKYNHADAEFQERLKEDTSFGGNLGRAVFQAKKRLLEPLGLVEEAAKTAPGKKRPVEQSPQEPDSSAGIGKSGAQPAKKRLNFGQTGDSESVPDPQPLGEPPAAPSGVGPNTMAAGGGAPMADNNEGADGVGSSSGNWHCDSTWLGDRVITTSTRTWALPTYNNHLYKQISNGTSGGATNDNTYFGYSTPWGYFDFNRFHCHFSPRDWQRLINNNWGFRPKRLSFKLFNIQVKEVTQNEGTKTIANNLTSTIQVFTDSEYQLPYVLGSAHQGCLPPFPADVFMIPQYGYLTLNNGSQAVGRSSFYCLEYFPSQMLRTGNNFQFTYTFEDVPFHSSYAHSQSLDRLMNPLIDQYLYYLSRTQTTSNGRGVTLGFSQGGPNTMANQAKNWLPGPCYRQQRVSTMSAASGSGNFAWTAGTKYHLNGRNSLANPGIAMATHKDDEERFFPSNGILIFGKQNAARDNADYSDVMLTSEEEIKTTNPVATEEYGIVADNLQQQNTAPQIGTVNSQGALPGMVWQNRDVYLQGPIWAKIPHTDGNFHPSPLMGGFGLKHPPPQILIKNTPVPADPPTTFNQSKLNSFITQYSTGQVSVEIEWELQKENSKRWNPEIQYTSNYYKSTSVDFAVNTEGVYSEPRPIGTRYLTRNL

SEQ ID NO: 63 - protein, 736 aa, Artificial Sequence
  AAV capsid variant
MAADGYLPDWLEDNLSEGIREWWALKPGAPQPKANQQHQDNARGLVLPGYKYLGPGNGLDKGEPVNAADAAALEHDKAYDQQLKAGDNPYLKYNHADAEFQERLKEDTSFGGNLGRAVFQAKKRLLEPLGLVEEAAKTAPGKKRPVEQSPQEPDSSAGIGKSGAQPAKKRLNFGQTGDSESVPDPQPLGEPPAAPSGVGPNTMAAGGGAPMADNNEGADGVGSSSGNWHCDSTWLGDRVITTSTRTWALPTYNNHLYKQISNGTSGGATNDNTYFGYSTPWGYFDFNRFHCHFSPRDWQRLINNNWGFRPKRLSFKLFNIQVKEVTQNEGTKTIANNLTSTIQVFTDSEYQLPYVLGSAHQGCLPPFPADVFMIPQYGYLTLNNGSQAVGRSSFYCLEYFPSQMLRTGNNFQFTYTFEDVPFHSSYAHSQSLDRLMNPLIDQYLYYLSRTQTTSNGRGVTLGFSQGGPNTMANQAKNWLPGPCYRQQRVSTGTNLGKEQNFAWTAGTKYHLNGRNSLANPGIAMATHKDDEERFFPSNGILIFGKQNAARDNADYSDVMLTSEEEIKTTNPVATEEYGIVADNLQQQNTAPQIGTVNSQGALPGMVWQNRDVYLQGPIWAKIPHTDGNFHPSPLMGGFGLKHPPPQILIKNTPVPADPPTTFNQSKLNSFITQYSTGQVSVEIEWELQKENSKRWNPEIQYTSNYYKSTSVDFAVNTEGVYSEPRPIGTRYLTRNL

SEQ ID NO: 64 - protein, 736 aa, Artificial Sequence
  AAV capsid variant
MAADGYLPDWLEDNLSEGIREWWALKPGAPQPKANQQHQDNARGLVLPGYKYLGPGNGLDKGEPVNAADAAALEHDKAYDQQLKAGDNPYLKYNHADAEFQERLKEDTSFGGNLGRAVFQAKKRLLEPLGLVEEAAKTAPGKKRPVEQSPQEPDSSAGIGKSGAQPAKKRLNFGQTGDSESVPDPQPLGEPPAAPSGVGPNTMAAGGGAPMADNNEGADGVGSSSGNWHCDSTWLGDRVITTSTRTWALPTYNNHLYKQISNGTSGGATNDNTYFGYSTPWGYFDFNRFHCHFSPRDWQRLINNNWGFRPKRLSFKLFNIQVKEVTQNEGTKTIANNLTSTIQVFTDSEYQLPYVLGSAHQGCLPPFPADVFMIPQYGYLTLNNGSQAVGRSSFYCLEYFPSQMLRTGNNFQFTYTFEDVPFHSSYAHSQSLDRLMNPLIDQYLYYLSRTQTTSNGRGVTLGFSQGGPNTMANQAKNWLPGPCYRQQRVSTSSHSGTNQNFAWTAGTKYHLNGRNSLANPGIAMATHKDDEERFFPSNGILIFGKQNAARDNADYSDVMLTSEEEIKTTNPVATEEYGIVADNLQQQNTAPQIGTVNSQGALPGMVWQNRDVYLQGPIWAKIPHTDGNFHPSPLMGGFGLKHPPPQILIKNTPVPADPPTTFNQSKLNSFITQYSTGQVSVEIEWELQKENSKRWNPEIQYTSNYYKSTSVDFAVNTEGVYSEPRPIGTRYLTRNL

SEQ ID NO: 65 - protein, 736 aa, Artificial Sequence
  AAV capsid variant
MAADGYLPDWLEDNLSEGIREWWALKPGAPQPKANQQHQDNARGLVLPGYKYLGPGNGLDKGEPVNAADAAALEHDKAYDQQLKAGDNPYLKYNHADAEFQERLKEDTSFGGNLGRAVFQAKKRLLEPLGLVEEAAKTAPGKKRPVEQSPQEPDSSAGIGKSGAQPAKKRLNFGQTGDSESVPDPQPLGEPPAAPSGVGPNTMAAGGGAPMADNNEGADGVGSSSGNWHCDSTWLGDRVITTSTRTWALPTYNNHLYKQISNGTSGGATNDNTYFGYSTPWGYFDFNRFHCHFSPRDWQRLINNNWGFRPKRLSFKLFNIQVKEVTQNEGTKTIANNLTSTIQVFTDSEYQLPYVLGSAHQGCLPPFPADVFMIPQYGYLTLNNGSQAVGRSSFYCLEYFPSQMLRTGNNFQFTYTFEDVPFHSSYAHSQSLDRLMNPLIDQYLYYLSRTQTTSNGRGVTLGFSQGGPNTMANQAKNWLPGPCYRQQRVSTVATRDGQLNFAWTAGTKYHLNGRNSLANPGIAMATHKDDEERFFPSNGILIFGKQNAARDNADYSDVMLTSEEEIKTTNPVATEEYGIVADNLQQQNTAPQIGTVNSQGALPGMVWQNRDVYLQGPIWAKIPHTDGNFHPSPLMGGFGLKHPPPQILIKNTPVPADPPTTFNQSKLNSFITQYSTGQVSVEIEWELQKENSKRWNPEIQYTSNYYKSTSVDFAVNTEGVYSEPRPIGTRYLTRNL

SEQ ID NO: 66 - protein, 736 aa, Artificial Sequence
  AAV capsid variant
MAADGYLPDWLEDNLSEGIREWWALKPGAPQPKANQQHQDNARGLVLPGYKYLGPGNGLDKGEPVNAADAAALEHDKAYDQQLKAGDNPYLKYNHADAEFQERLKEDTSFGGNLGRAVFQAKKRLLEPLGLVEEAAKTAPGKKRPVEQSPQEPDSSAGIGKSGAQPAKKRLNFGQTGDSESVPDPQPLGEPPAAPSGVGPNTMAAGGGAPMADNNEGADGVGSSSGNWHCDSTWLGDRVITTSTRTWALPTYNNHLYKQISNGTSGGATNDNTYFGYSTPWGYFDFNRFHCHFSPRDWQRLINNNWGFRPKRLSFKLFNIQVKEVTQNEGTKTIANNLTSTIQVFTDSEYQLPYVLGSAHQGCLPPFPADVFMIPQYGYLTLNNGSQAVGRSSFYCLEYFPSQMLRTGNNFQFTYTFEDVPFHSSYAHSQSLDRLMNPLIDQYLYYLSRTQTTSNGRGVTLGFSQGGPNTMANQAKNWLPGPCYRQQRVSTALNADTGTNFAWTAGTKYHLNGRNSLANPGIAMATHKDDEERFFPSNGILIFGKQNAARDNADYSDVMLTSEEEIKTTNPVATEEYGIVADNLQQQNTAPQIGTVNSQGALPGMVWQNRDVYLQGPIWAKIPHTDGNFHPSPLMGGFGLKHPPPQILIKNTPVPADPPTTFNQSKLNSFITQYSTGQVSVEIEWELQKENSKRWNPEIQYTSNYYKSTSVDFAVNTEGVYSEPRPIGTRYLTRNL

SEQ ID NO: 67 - protein, 737 aa, Artificial Sequence
  AAV capsid variant
MAADGYLPDWLEDNLSEGIREWWALKPGAPQPKANQQHQDNARGLVLPGYKYLGPGNGLDKGEPVNAADAAALEHDKAYDQQLKAGDNPYLKYNHADAEFQERLKEDTSFGGNLGRAVFQAKKRLLEPLGLVEEAAKTAPGKKRPVEQSPQEPDSSAGIGKSGAQPAKKRLNFGQTGDSESVPDPQPLGEPPAAPSGVGPNTMAAGGGAPMADNNEGADGVGSSSGNWHCDSTWLGDRVITTSTRTWALPTYNNHLYKQISNGTSGGATNDNTYFGYSTPWGYFDFNRFHCHFSPRDWQRLINNNWGFRPKRLSFKLFNIQVKEVTQNEGTKTIANNLTSTIQVFTDSEYQLPYVLGSAHQGCLPPFPADVFMIPQYGYLTLNNGSQAVGRSSFYCLEYFPSQMLRTGNNFQFTYTFEDVPFHSSYAHSQSLDRLMNPLIDQYLYYLSRTQTTGGTANTQTLGFSQGGPNTMANQAKNWLPGPCYRQQRVSTNLAENFKYNFAWTAGTKYHLNGRNSLANPGIAMATHKDDEERFFPSNGILIFGKQNAARDNADYSDVMLTSEEEIKTTNPVATEEYGIVADNVMEPTRAPQIGTVNSQGALPGMVWQNRDVYLQGPIWAKIPHTDGNFHPSPLMGGFGLKHPPPQILIKNTPVPADPPTTFNQSKLNSFITQYSTGQVSVEIEWELQKENSKRWNPEIQYTSNYYKSTSVDFAVNTEGVYSEPRPIGTRYLTRNL

SEQ ID NO: 68 - protein, 737 aa, Artificial Sequence
  AAV capsid variant
MAADGYLPDWLEDNLSEGIREWWALKPGAPQPKANQQHQDNARGLVLPGYKYLGPGNGLDKGEPVNAADAAALEHDKAYDQQLKAGDNPYLKYNHADAEFQERLKEDTSFGGNLGRAVFQAKKRLLEPLGLVEEAAKTAPGKKRPVEQSPQEPDSSAGIGKSGAQPAKKRLNFGQTGDSESVPDPQPLGEPPAAPSGVGPNTMAAGGGAPMADNNEGADGVGSSSGNWHCDSTWLGDRVITTSTRTWALPTYNNHLYKQISNGTSGGATNDNTYFGYSTPWGYFDFNRFHCHFSPRDWQRLINNNWGFRPKRLSFKLFNIQVKEVTQNEGTKTIANNLTSTIQVFTDSEYQLPYVLGSAHQGCLPPFPADVFMIPQYGYLTLNNGSQAVGRSSFYCLEYFPSQMLRTGNNFQFTYTFEDVPFHSSYAHSQSLDRLMNPLIDQYLYYLSRTQTTGGTANTQTLGFSQGGPNTMANQAKNWLPGPCYRQQRVSTVLSGDHSANFAWTAGTKYHLNGRNSLANPGIAMATHKDDEERFFPSNGILIFGKQNAARDNADYSDVMLTSEEEIKTTNPVATEEYGIVADNVMEPTRAPQIGTVNSQGALPGMVWQNRDVYLQGPIWAKIPHTDGNFHPSPLMGGFGLKHPPPQILIKNTPVPADPPTTFNQSKLNSFITQYSTGQVSVEIEWELQKENSKRWNPEIQYTSNYYKSTSVDFAVNTEGVYSEPRPIGTRYLTRNL

SEQ ID NO: 69 - protein, 737 aa, Artificial Sequence
  AAV capsid variant
MAADGYLPDWLEDNLSEGIREWWALKPGAPQPKANQQHQDNARGLVLPGYKYLGPGNGLDKGEPVNAADAAALEHDKAYDQQLKAGDNPYLKYNHADAEFQERLKEDTSFGGNLGRAVFQAKKRLLEPLGLVEEAAKTAPGKKRPVEQSPQEPDSSAGIGKSGAQPAKKRLNFGQTGDSESVPDPQPLGEPPAAPSGVGPNTMAAGGGAPMADNNEGADGVGSSSGNWHCDSTWLGDRVITTSTRTWALPTYNNHLYKQISNGTSGGATNDNTYFGYSTPWGYFDFNRFHCHFSPRDWQRLINNNWGFRPKRLSFKLFNIQVKEVTQNEGTKTIANNLTSTIQVFTDSEYQLPYVLGSAHQGCLPPFPADVFMIPQYGYLTLNNGSQAVGRSSFYCLEYFPSQMLRTGNNFQFTYTFEDVPFHSSYAHSQSLDRLMNPLIDQYLYYLSRTQTTGGTANTQTLGFSQGGPNTMANQAKNWLPGPCYRQQRVSTMSAASGSGNFAWTAGTKYHLNGRNSLANPGIAMATHKDDEERFFPSNGILIFGKQNAARDNADYSDVMLTSEEEIKTTNPVATEEYGIVADNVMEPTRAPQIGTVNSQGALPGMVWQNRDVYLQGPIWAKIPHTDGNFHPSPLMGGFGLKHPPPQILIKNTPVPADPPTTFNQSKLNSFITQYSTGQVSVEIEWELQKENSKRWNPEIQYTSNYYKSTSVDFAVNTEGVYSEPRPIGTRYLTRNL

SEQ ID NO: 70 - protein, 737 aa, Artificial Sequence
  AAV capsid variant
MAADGYLPDWLEDNLSEGIREWWALKPGAPQPKANQQHQDNARGLVLPGYKYLGPGNGLDKGEPVNAADAAALEHDKAYDQQLKAGDNPYLKYNHADAEFQERLKEDTSFGGNLGRAVFQAKKRLLEPLGLVEEAAKTAPGKKRPVEQSPQEPDSSAGIGKSGAQPAKKRLNFGQTGDSESVPDPQPLGEPPAAPSGVGPNTMAAGGGAPMADNNEGADGVGSSSGNWHCDSTWLGDRVITTSTRTWALPTYNNHLYKQISNGTSGGATNDNTYFGYSTPWGYFDFNRFHCHFSPRDWQRLINNNWGFRPKRLSFKLFNIQVKEVTQNEGTKTIANNLTSTIQVFTDSEYQLPYVLGSAHQGCLPPFPADVFMIPQYGYLTLNNGSQAVGRSSFYCLEYFPSQMLRTGNNFQFTYTFEDVPFHSSYAHSQSLDRLMNPLIDQYLYYLSRTQTTGGTANTQTLGFSQGGPNTMANQAKNWLPGPCYRQQRVSTGTNLGKEQNFAWTAGTKYHLNGRNSLANPGIAMATHKDDEERFFPSNGILIFGKQNAARDNADYSDVMLTSEEEIKTTNPVATEEYGIVADNVMEPTRAPQIGTVNSQGALPGMVWQNRDVYLQGPIWAKIPHTDGNFHPSPLMGGFGLKHPPPQILIKNTPVPADPPTTFNQSKLNSFITQYSTGQVSVEIEWELQKENSKRWNPEIQYTSNYYKSTSVDFAVNTEGVYSEPRPIGTRYLTRNL

SEQ ID NO: 71 - protein, 737 aa, Artificial Sequence
  AAV capsid variant
MAADGYLPDWLEDNLSEGIREWWALKPGAPQPKANQQHQDNARGLVLPGYKYLGPGNGLDKGEPVNAADAAALEHDKAYDQQLKAGDNPYLKYNHADAEFQERLKEDTSFGGNLGRAVFQAKKRLLEPLGLVEEAAKTAPGKKRPVEQSPQEPDSSAGIGKSGAQPAKKRLNFGQTGDSESVPDPQPLGEPPAAPSGVGPNTMAAGGGAPMADNNEGADGVGSSSGNWHCDSTWLGDRVITTSTRTWALPTYNNHLYKQISNGTSGGATNDNTYFGYSTPWGYFDFNRFHCHFSPRDWQRLINNNWGFRPKRLSFKLFNIQVKEVTQNEGTKTIANNLTSTIQVFTDSEYQLPYVLGSAHQGCLPPFPADVFMIPQYGYLTLNNGSQAVGRSSFYCLEYFPSQMLRTGNNFQFTYTFEDVPFHSSYAHSQSLDRLMNPLIDQYLYYLSRTQTTGGTANTQTLGFSQGGPNTMANQAKNWLPGPCYRQQRVSTSSHSGTNQNFAWTAGTKYHLNGRNSLANPGIAMATHKDDEERFFPSNGILIFGKQNAARDNADYSDVMLTSEEEIKTTNPVATEEYGIVADNVMEPTRAPQIGTVNSQGALPGMVWQNRDVYLQGPIWAKIPHTDGNFHPSPLMGGFGLKHPPPQILIKNTPVPADPPTTFNQSKLNSFITQYSTGQVSVEIEWELQKENSKRWNPEIQYTSNYYKSTSVDFAVNTEGVYSEPRPIGTRYLTRNL

SEQ ID NO: 72 - protein, 737 aa, Artificial Sequence
  AAV capsid variant
MAADGYLPDWLEDNLSEGIREWWALKPGAPQPKANQQHQDNARGLVLPGYKYLGPGNGLDKGEPVNAADAAALEHDKAYDQQLKAGDNPYLKYNHADAEFQERLKEDTSFGGNLGRAVFQAKKRLLEPLGLVEEAAKTAPGKKRPVEQSPQEPDSSAGIGKSGAQPAKKRLNFGQTGDSESVPDPQPLGEPPAAPSGVGPNTMAAGGGAPMADNNEGADGVGSSSGNWHCDSTWLGDRVITTSTRTWALPTYNNHLYKQISNGTSGGATNDNTYFGYSTPWGYFDFNRFHCHFSPRDWQRLINNNWGFRPKRLSFKLFNIQVKEVTQNEGTKTIANNLTSTIQVFTDSEYQLPYVLGSAHQGCLPPFPADVFMIPQYGYLTLNNGSQAVGRSSFYCLEYFPSQMLRTGNNFQFTYTFEDVPFHSSYAHSQSLDRLMNPLIDQYLYYLSRTQTTGGTANTQTLGFSQGGPNTMANQAKNWLPGPCYRQQRVSTVATRDGQLNFAWTAGTKYHLNGRNSLANPGIAMATHKDDEERFFPSNGILIFGKQNAARDNADYSDVMLTSEEEIKTTNPVATEEYGIVADNVMEPTRAPQIGTVNSQGALPGMVWQNRDVYLQGPIWAKIPHTDGNFHPSPLMGGFGLKHPPPQILIKNTPVPADPPTTFNQSKLNSFITQYSTGQVSVEIEWELQKENSKRWNPEIQYTSNYYKSTSVDFAVNTEGVYSEPRPIGTRYLTRNL

SEQ ID NO: 73 - protein, 737 aa, Artificial Sequence
  AAV capsid variant
MAADGYLPDWLEDNLSEGIREWWALKPGAPQPKANQQHQDNARGLVLPGYKYLGPGNGLDKGEPVNAADAAALEHDKAYDQQLKAGDNPYLKYNHADAEFQERLKEDTSFGGNLGRAVFQAKKRLLEPLGLVEEAAKTAPGKKRPVEQSPQEPDSSAGIGKSGAQPAKKRLNFGQTGDSESVPDPQPLGEPPAAPSGVGPNTMAAGGGAPMADNNEGADGVGSSSGNWHCDSTWLGDRVITTSTRTWALPTYNNHLYKQISNGTSGGATNDNTYFGYSTPWGYFDFNRFHCHFSPRDWQRLINNNWGFRPKRLSFKLFNIQVKEVTQNEGTKTIANNLTSTIQVFTDSEYQLPYVLGSAHQGCLPPFPADVFMIPQYGYLTLNNGSQAVGRSSFYCLEYFPSQMLRTGNNFQFTYTFEDVPFHSSYAHSQSLDRLMNPLIDQYLYYLSRTQTTGGTANTQTLGFSQGGPNTMANQAKNWLPGPCYRQQRVSTALNADTGTNFAWTAGTKYHLNGRNSLANPGIAMATHKDDEERFFPSNGILIFGKQNAARDNADYSDVMLTSEEEIKTTNPVATEEYGIVADNVMEPTRAPQIGTVNSQGALPGMVWQNRDVYLQGPIWAKIPHTDGNFHPSPLMGGFGLKHPPPQILIKNTPVPADPPTTFNQSKLNSFITQYSTGQVSVEIEWELQKENSKRWNPEIQYTSNYYKSTSVDFAVNTEGVYSEPRPIGTRYLTRNL

SEQ ID NO: 74 - protein, 736 aa, Artificial Sequence
  AAV capsid variant
MAADGYLPDWLEDNLSEGIREWWALKPGAPQPKANQQHQDNARGLVLPGYKYLGPGNGLDKGEPVNAADAAALEHDKAYDQQLKAGDNPYLKYNHADAEFQERLKEDTSFGGNLGRAVFQAKKRLLEPLGLVEEAAKTAPGKKRPVEQSPQEPDSSAGIGKSGAQPAKKRLNFGQTGDSESVPDPQPLGEPPAAPSGVGPNTMAAGGGAPMADNNEGADGVGSSSGNWHCDSTWLGDRVITTSTRTWALPTYNNHLYKQISNGTSGGATNDNTYFGYSTPWGYFDFNRFHCHFSPRDWQRLINNNWGFRPKRLSFKLFNIQVKEVTQNEGTKTIANNLTSTIQVFTDSEYQLPYVLGSAHQGCLPPFPADVFMIPQYGYLTLNNGSQAVGRSSFYCLEYFPSQMLRTGNNFQFTYTFEDVPFHSSYAHSQSLDRLMNPLIDQYLYYLSRTQTTSNGRGVTLGFSQGGPNTMANQAKNWLPGPCYRQQRVSTNLAENFKYNFAWTAGTKYHLNGRNSLANPGIAMATHKDDEERFFPSNGILIFGKQNAARDNADYSDVMLTSEEEIKTTNPVATEEYGIVADNVMEPTRAPQIGTVNSQGALPGMVWQNRDVYLQGPIWAKIPHTDGNFHPSPLMGGFGLKHPPPQILIKNTPVPADPPTTFNQSKLNSFITQYSTGQVSVEIEWELQKENSKRWNPEIQYTSNYYKSTSVDFAVNTEGVYSEPRPIGTRYLTRNL

SEQ ID NO: 75 - protein, 736 aa, Artificial Sequence
  AAV capsid variant
MAADGYLPDWLEDNLSEGIREWWALKPGAPQPKANQQHQDNARGLVLPGYKYLGPGNGLDKGEPVNAADAAALEHDKAYDQQLKAGDNPYLKYNHADAEFQERLKEDTSFGGNLGRAVFQAKKRLLEPLGLVEEAAKTAPGKKRPVEQSPQEPDSSAGIGKSGAQPAKKRLNFGQTGDSESVPDPQPLGEPPAAPSGVGPNTMAAGGGAPMADNNEGADGVGSSSGNWHCDSTWLGDRVITTSTRTWALPTYNNHLYKQISNGTSGGATNDNTYFGYSTPWGYFDFNRFHCHFSPRDWQRLINNNWGFRPKRLSFKLFNIQVKEVTQNEGTKTIANNLTSTIQVFTDSEYQLPYVLGSAHQGCLPPFPADVFMIPQYGYLTLNNGSQAVGRSSFYCLEYFPSQMLRTGNNFQFTYTFEDVPFHSSYAHSQSLDRLMNPLIDQYLYYLSRTQTTSNGRGVTLGFSQGGPNTMANQAKNWLPGPCYRQQRVSTVLSGDHSANFAWTAGTKYHLNGRNSLANPGIAMATHKDDEERFFPSNGILIFGKQNAARDNADYSDVMLTSEEEIKTTNPVATEEYGIVADNVMEPTRAPQIGTVNSQGALPGMVWQNRDVYLQGPIWAKIPHTDGNFHPSPLMGGFGLKHPPPQILIKNTPVPADPPTTFNQSKLNSFITQYSTGQVSVEIEWELQKENSKRWNPEIQYTSNYYKSTSVDFAVNTEGVYSEPRPIGTRYLTRNL

SEQ ID NO: 76 - protein, 736 aa, Artificial Sequence
  AAV capsid variant
MAADGYLPDWLEDNLSEGIREWWALKPGAPQPKANQQHQDNARGLVLPGYKYLGPGNGLDKGEPVNAADAAALEHDKAYDQQLKAGDNPYLKYNHADAEFQERLKEDTSFGGNLGRAVFQAKKRLLEPLGLVEEAAKTAPGKKRPVEQSPQEPDSSAGIGKSGAQPAKKRLNFGQTGDSESVPDPQPLGEPPAAPSGVGPNTMAAGGGAPMADNNEGADGVGSSSGNWHCDSTWLGDRVITTSTRTWALPTYNNHLYKQISNGTSGGATNDNTYFGYSTPWGYFDFNRFHCHFSPRDWQRLINNNWGFRPKRLSFKLFNIQVKEVTQNEGTKTIANNLTSTIQVFTDSEYQLPYVLGSAHQGCLPPFPADVFMIPQYGYLTLNNGSQAVGRSSFYCLEYFPSQMLRTGNNFQFTYTFEDVPFHSSYAHSQSLDRLMNPLIDQYLYYLSRTQTTSNGRGVTLGFSQGGPNTMANQAKNWLPGPCYRQQRVSTMSAASGSGNFAWTAGTKYHLNGRNSLANPGIAMATHKDDEERFFPSNGILIFGKQNAARDNADYSDVMLTSEEEIKTTNPVATEEYGIVADNVMEPTRAPQIGTVNSQGALPGMVWQNRDVYLQGPIWAKIPHTDGNFHPSPLMGGFGLKHPPPQILIKNTPVPADPPTTFNQSKLNSFITQYSTGQVSVEIEWELQKENSKRWNPEIQYTSNYYKSTSVDFAVNTEGVYSEPRPIGTRYLTRNL

SEQ ID NO: 77 - protein, 736 aa, Artificial Sequence
  AAV capsid variant
MAADGYLPDWLEDNLSEGIREWWALKPGAPQPKANQQHQDNARGLVLPGYKYLGPGNGLDKGEPVNAADAAALEHDKAYDQQLKAGDNPYLKYNHADAEFQERLKEDTSFGGNLGRAVFQAKKRLLEPLGLVEEAAKTAPGKKRPVEQSPQEPDSSAGIGKSGAQPAKKRLNFGQTGDSESVPDPQPLGEPPAAPSGVGPNTMAAGGGAPMADNNEGADGVGSSSGNWHCDSTWLGDRVITTSTRTWALPTYNNHLYKQISNGTSGGATNDNTYFGYSTPWGYFDFNRFHCHFSPRDWQRLINNNWGFRPKRLSFKLFNIQVKEVTQNEGTKTIANNLTSTIQVFTDSEYQLPYVLGSAHQGCLPPFPADVFMIPQYGYLTLNNGSQAVGRSSFYCLEYFPSQMLRTGNNFQFTYTFEDVPFHSSYAHSQSLDRLMNPLIDQYLYYLSRTQTTSNGRGVTLGFSQGGPNTMANQAKNWLPGPCYRQQRVSTGTNLGKEQNFAWTAGTKYHLNGRNSLANPGIAMATHKDDEERFFPSNGILIFGKQNAARDNADYSDVMLTSEEEIKTTNPVATEEYGIVADNVMEPTRAPQIGTVNSQGALPGMVWQNRDVYLQGPIWAKIPHTDGNFHPSPLMGGFGLKHPPPQILIKNTPVPADPPTTFNQSKLNSFITQYSTGQVSVEIEWELQKENSKRWNPEIQYTSNYYKSTSVDFAVNTEGVYSEPRPIGTRYLTRNL

SEQ ID NO: 78 - protein, 736 aa, Artificial Sequence
  AAV capsid variant
MAADGYLPDWLEDNLSEGIREWWALKPGAPQPKANQQHQDNARGLVLPGYKYLGPGNGLDKGEPVNAADAAALEHDKAYDQQLKAGDNPYLKYNHADAEFQERLKEDTSFGGNLGRAVFQAKKRLLEPLGLVEEAAKTAPGKKRPVEQSPQEPDSSAGIGKSGAQPAKKRLNFGQTGDSESVPDPQPLGEPPAAPSGVGPNTMAAGGGAPMADNNEGADGVGSSSGNWHCDSTWLGDRVITTSTRTWALPTYNNHLYKQISNGTSGGATNDNTYFGYSTPWGYFDFNRFHCHFSPRDWQRLINNNWGFRPKRLSFKLFNIQVKEVTQNEGTKTIANNLTSTIQVFTDSEYQLPYVLGSAHQGCLPPFPADVFMIPQYGYLTLNNGSQAVGRSSFYCLEYFPSQMLRTGNNFQFTYTFEDVPFHSSYAHSQSLDRLMNPLIDQYLYYLSRTQTTSNGRGVTLGFSQGGPNTMANQAKNWLPGPCYRQQRVSTSSHSGTNQNFAWTAGTKYHLNGRNSLANPGIAMATHKDDEERFFPSNGILIFGKQNAARDNADYSDVMLTSEEEIKTTNPVATEEYGIVADNVMEPTRAPQIGTVNSQGALPGMVWQNRDVYLQGPIWAKIPHTDGNFHPSPLMGGFGLKHPPPQILIKNTPVPADPPTTFNQSKLNSFITQYSTGQVSVEIEWELQKENSKRWNPEIQYTSNYYKSTSVDFAVNTEGVYSEPRPIGTRYLTRNL

SEQ ID NO: 79 - protein, 736 aa, Artificial Sequence
  AAV capsid variant
MAADGYLPDWLEDNLSEGIREWWALKPGAPQPKANQQHQDNARGLVLPGYKYLGPGNGLDKGEPVNAADAAALEHDKAYDQQLKAGDNPYLKYNHADAEFQERLKEDTSFGGNLGRAVFQAKKRLLEPLGLVEEAAKTAPGKKRPVEQSPQEPDSSAGIGKSGAQPAKKRLNFGQTGDSESVPDPQPLGEPPAAPSGVGPNTMAAGGGAPMADNNEGADGVGSSSGNWHCDSTWLGDRVITTSTRTWALPTYNNHLYKQISNGTSGGATNDNTYFGYSTPWGYFDFNRFHCHFSPRDWQRLINNNWGFRPKRLSFKLFNIQVKEVTQNEGTKTIANNLTSTIQVFTDSEYQLPYVLGSAHQGCLPPFPADVFMIPQYGYLTLNNGSQAVGRSSFYCLEYFPSQMLRTGNNFQFTYTFEDVPFHSSYAHSQSLDRLMNPLIDQYLYYLSRTQTTSNGRGVTLGFSQGGPNTMANQAKNWLPGPCYRQQRVSTVATRDGQLNFAWTAGTKYHLNGRNSLANPGIAMATHKDDEERFFPSNGILIFGKQNAARDNADYSDVMLTSEEEIKTTNPVATEEYGIVADNVMEPTRAPQIGTVNSQGALPGMVWQNRDVYLQGPIWAKIPHTDGNFHPSPLMGGFGLKHPPPQILIKNTPVPADPPTTFNQSKLNSFITQYSTGQVSVEIEWELQKENSKRWNPEIQYTSNYYKSTSVDFAVNTEGVYSEPRPIGTRYLTRNL

SEQ ID NO: 80 - protein, 736 aa, Artificial Sequence
  AAV capsid variant
MAADGYLPDWLEDNLSEGIREWWALKPGAPQPKANQQHQDNARGLVLPGYKYLGPGNGLDKGEPVNAADAAALEHDKAYDQQLKAGDNPYLKYNHADAEFQERLKEDTSFGGNLGRAVFQAKKRLLEPLGLVEEAAKTAPGKKRPVEQSPQEPDSSAGIGKSGAQPAKKRLNFGQTGDSESVPDPQPLGEPPAAPSGVGPNTMAAGGGAPMADNNEGADGVGSSSGNWHCDSTWLGDRVITTSTRTWALPTYNNHLYKQISNGTSGGATNDNTYFGYSTPWGYFDFNRFHCHFSPRDWQRLINNNWGFRPKRLSFKLFNIQVKEVTQNEGTKTIANNLTSTIQVFTDSEYQLPYVLGSAHQGCLPPFPADVFMIPQYGYLTLNNGSQAVGRSSFYCLEYFPSQMLRTGNNFQFTYTFEDVPFHSSYAHSQSLDRLMNPLIDQYLYYLSRTQTTSNGRGVTLGFSQGGPNTMANQAKNWLPGPCYRQQRVSTALNADTGTNFAWTAGTKYHLNGRNSLANPGIAMATHKDDEERFFPSNGILIFGKQNAARDNADYSDVMLTSEEEIKTTNPVATEEYGIVADNVMEPTRAPQIGTVNSQGALPGMVWQNRDVYLQGPIWAKIPHTDGNFHPSPLMGGFGLKHPPPQILIKNTPVPADPPTTFNQSKLNSFITQYSTGQVSVEIEWELQKENSKRWNPEIQYTSNYYKSTSVDFAVNTEGVYSEPRPIGTRYLTRNL

SEQ ID NO: 81 - protein, 734 aa, Dependovirus adeno-associated virus 4
MTDGYLPDWLEDNLSEGVREWWALQPGAPKPKANQQHQDNARGLVLPGYKYLGPGNGLDKGEPVNAADAAALEHDKAYDQQLKAGDNPYLKYNHADAEFQQRLQGDTSFGGNLGRAVFQAKKRVLEPLGLVEQAGETAPGKKRPLIESPQQPDSSTGIGKKGKQPAKKKLVFEDETGAGDGPPEGSTSGAMSDDSEMRAAAGGAAVEGGQGADGVGNASGDWHCDSTWSEGHVTTTSTRTWVLPTYNNHLYKRLGESLQSNTYNGFSTPWGYFDFNRFHCHFSPRDWQRLINNNWGMRPKAMRVKIFNIQVKEVTTSNGETTVANNLTSTVQIFADSSYELPYVMDAGQEGSLPPFPNDVFMVPQYGYCGLVTGNTSQQQTDRNAFYCLEYFPSQMLRTGNNFEITYSFEKVPFHSMYAHSQSLDRLMNPLIDQYLWGLQSTTTGTTLNAGTATTNFTKLRPTNFSNFKKNWLPGPSIKQQGFSKTANQNYKIPATGSDSLIKYETHSTLDGRWSALTPGPPMATAGPADSKFSNSQLIFAGPKQNGNTATVPGTLIFTSEEELAATNATDTDMWGNLPGGDQSNSNLPTVDRLTALGAVPGMVWQNRDIYYQGPIWAKIPHTDGHFHPSPLIGGFGLKHPPPQIFIKNTPVPANPATTFSSTPVNSFITQYSTGQVSVQIDWEIQKERSKRWNPEVQFTSNYGQQNSLLWAPDAAGKYTEPRAIGTRYLTHHL

SEQ ID NO: 82 - protein, 724 aa, Dependovirus adeno-associated virus 5
MSFVDHPPDWLEEVGEGLREFLGLEAGPPKPKPNQQHQDQARGLVLPGYNYLGPGNGLDRGEPVNRADEVAREHDISYNEQLEAGDNPYLKYNHADAEFQEKLADDTSFGGNLGKAVFQAKKRVLEPFGLVEEGAKTAPTGKRIDDHFPKRKKARTEEDSKPSTSSDAEAGPSGSQQLQIPAQPASSLGADTMSAGGGGPLGDNNQGADGVGNASGDWHCDSTWMGDRVVTKSTRTWVLPSYNNHQYREIKSGSVDGSNANAYFGYSTPWGYFDFNRFHSHWSPRDWQRLINNYWGFRPRSLRVKIFNIQVKEVTVQDSTTTIANNLTSTVQVFTDDDYQLPYVVGNGTEGCLPAFPPQVFTLPQYGYATLNRDNTENPTERSSFFCLEYFPSKMLRTGNNFEFTYNFEEVPFHSSFAPSQNLFKLANPLVDQYLYRFVSTNNTGGVQFNKNLAGRYANTYKNWFPGPMGRTQGWNLGSGVNRASVSAFATTNRMELEGASYQVPPQPNGMTNNLQGSNTYALENTMIFNSQPANPGTTATYLEGNMLITSESETQPVNRVAYNVGGQMATNNQSSTTAPATGTYNLQEIVPGSVWMERDVYLQGPIWAKIPETGAHFHPSPAMGGFGLKHPPPMMLIKNTPVPGNITSFSDVPVSSFITQYSTGQVTVEMEWELKKENSKRWNPEIQYTNNYNDPQFVDFAPDSTGEYRTTRPIGTRYLTRPL

SEQ ID NO: 83 - protein, 5 aa, Artificial Sequence
  peptide motif triggers uptake by liver cells
FVFLP

SEQ ID NO: 84 - protein, 4 aa, Artificial Sequence
  targeting peptide
  misc_feature (2)..(3): Xaa can be any neutral or hydrophobic amino acid
BXXB

SEQ ID NO: 85 - protein, 4 aa, Artificial Sequence
  targeting peptide
RGNR

SEQ ID NO: 86 - protein, 7 aa, Artificial Sequence
  targeting peptide
  misc_feature (7)..(7): Xaa can be Gly or Ser
NSVRDLX

SEQ ID NO: 87 - protein, 7 aa, Artificial Sequence
  targeting peptide
PRSVTVP

SEQ ID NO: 88 - protein, 7 aa, Artificial Sequence
  targeting peptide
  misc_feature (6)..(6): Xaa can be any naturally occurring amino acid
  misc_feature (7)..(7): Xaa can be Ser or Ala
NSVSSXX

SEQ ID NO: 89 - protein, 6 aa, Artificial Sequence
  targeting peptide
NGRAHA

SEQ ID NO: 90 - protein, 7 aa, Artificial Sequence
  targeting peptide
QPEHSST

SEQ ID NO: 91 - protein, 7 aa, Artificial Sequence
  targeting peptide
VNTANST

SEQ ID NO: 92 - protein, 6 aa, Artificial Sequence
  targeting peptide
HGPMQS

SEQ ID NO: 93 - protein, 7 aa, Artificial Sequence
  targeting peptide
PHKPPLA

SEQ ID NO: 94 - protein, 7 aa, Artificial Sequence
  targeting peptide
IKNNEMW

SEQ ID NO: 95 - protein, 7 aa, Artificial Sequence
  targeting peptide
RNLDTPM

SEQ ID NO: 96 - protein, 7 aa, Artificial Sequence
  targeting peptide
VDSHRQS

SEQ ID NO: 97 - protein, 7 aa, Artificial Sequence
  targeting peptide
YDSKTKT

SEQ ID NO: 98 - protein, 7 aa, Artificial Sequence
  targeting peptide
SQLPHQK

SEQ ID NO: 99 - protein, 7 aa, Artificial Sequence
  targeting peptide
STMQQNT

SEQ ID NO: 100 - protein, 7 aa, Artificial Sequence
  targeting peptide
TERYMTQ

SEQ ID NO: 101 - protein, 7 aa, Artificial Sequence
  targeting peptide
QPEHSST

SEQ ID NO: 102 - protein, 7 aa, Artificial Sequence
  targeting peptide
DASLSTS

SEQ ID NO: 103 - protein, 6 aa, Artificial Sequence
  targeting peptide
DLPNKT

SEQ ID NO: 104 - protein, 7 aa, Artificial Sequence
  targeting peptide
DLTAARL

SEQ ID NO: 105 - protein, 7 aa, Artificial Sequence
  targeting peptide
EPHQFNY

SEQ ID NO: 106 - protein, 7 aa, Artificial Sequence
  targeting peptide
EPQSNHT

SEQ ID NO: 107 - protein, 7 aa, Artificial Sequence
  targeting peptide
MSSWPSQ

SEQ ID NO: 108 - protein, 7 aa, Artificial Sequence
  targeting peptide
NPKHNAT

SEQ ID NO: 109 - protein, 7 aa, Artificial Sequence
  targeting peptide
PDGMRTT

SEQ ID NO: 110 - protein, 7 aa, Artificial Sequence
  targeting peptide
PNNNKTT

SEQ ID NO: 111 - protein, 7 aa, Artificial Sequence
  targeting peptide
QSTTHDS

SEQ ID NO: 112 - protein, 7 aa, Artificial Sequence
  targeting peptide
TGSKQKQ

SEQ ID NO: 113 - protein, 7 aa, Artificial Sequence
  targeting peptide
SLKHQAL

SEQ ID NO: 114 - protein, 7 aa, Artificial Sequence
  targeting peptide
SPIDGEQ

SEQ ID NO: 115 - protein, 8 aa, Artificial Sequence
  targeting peptide
WIFPWIQL

SEQ ID NO: 116 - protein, 9 aa, Artificial Sequence
  targeting peptide
CDCRGDCFC

SEQ ID NO: 117 - protein, 5 aa, Artificial Sequence
  targeting peptide
CNGRC

SEQ ID NO: 118 - protein, 7 aa, Artificial Sequence
  targeting peptide
CPRECES

SEQ ID NO: 119 - protein, 10 aa, Artificial Sequence
  targeting peptide
CTTHWGFTLC

SEQ ID NO: 120 - protein, 9 aa, Artificial Sequence
  targeting peptide
CGRRAGGSC

SEQ ID NO: 121 - protein, 9 aa, Artificial Sequence
  targeting peptide
CKGGRAKDC

SEQ ID NO: 122 - protein, 9 aa, Artificial Sequence
  targeting peptide
CVPELGHEC

SEQ ID NO: 123 - protein, 9 aa, Artificial Sequence
  targeting peptide
CRRETAWAK

SEQ ID NO: 124 - protein, 14 aa, Artificial Sequence
  targeting peptide
VSWFSHRYSPFAVS

SEQ ID NO: 125 - protein, 13 aa, Artificial Sequence
  targeting peptide
GYRDGYAGPILYN

SEQ ID NO: 126 - protein, 7 aa, Artificial Sequence
  targeting peptide
  misc_feature (1)..(3): Xaa can be any naturally occurring amino acid
  MOD_RES (4)..(4): PHOSPHORYLATION
  MISC_FEATURE (5)..(7): Xaa can be any naturally occurring amino acid
XXXYXXX

SEQ ID NO: 127 - protein, 4 aa, Artificial Sequence
  targeting peptide
  MOD_RES (1)..(1): PHOSPHORYLATION
  MISC_FEATURE (2)..(2): Xaa can be any naturally occurring amino acid
YXNW

SEQ ID NO: 128 - protein, 7 aa, Artificial Sequence
  targeting peptide
RPLPPLP

SEQ ID NO: 129 - protein, 7 aa, Artificial Sequence
  targeting peptide
APPLPPR

SEQ ID NO: 130 - protein, 12 aa, Artificial Sequence
  targeting peptide
DVFYPYPYASGS

SEQ ID NO: 131 - protein, 6 aa, Artificial Sequence
  targeting peptide
MYWYPY

SEQ ID NO: 132 - protein, 12 aa, Artificial Sequence
  targeting peptide
DITWDQLWDLMK

SEQ ID NO: 133 - protein, 8 aa, Artificial Sequence
  targeting peptide
  misc_feature (5)..(5): Xaa can be Gly or Leu
CWDDXWLC

SEQ ID NO: 134 - protein, 14 aa, Artificial Sequence
  targeting peptide
EWCEYLGGYLRCYA

SEQ ID NO: 135 - protein, 14 aa, Artificial Sequence
  targeting peptide
  misc_feature (2)..(2): Xaa can be any naturally occurring amino acid
  misc_feature (4)..(5): Xaa can be any naturally occurring amino acid
  misc_feature (8)..(8): Xaa can be any naturally occurring amino acid
  misc_feature (11)..(11): Xaa can be any naturally occurring amino acid
  misc_feature (13)..(13): Xaa can be any naturally occurring amino acid
YXCXXGPXTWXCXP

SEQ ID NO: 136 - protein, 14 aa, Artificial Sequence
  targeting peptide
IEGPTLRQWLAARA

SEQ ID NO: 137 - protein, 5 aa, Artificial Sequence
  targeting peptide
  misc_feature (3)..(4): Xaa can be any naturally occurring amino acid
  misc_feature (5)..(5): Xaa can be Tyr, Trp, Phe or His
LWXXX

SEQ ID NO: 138 - protein, 7 aa, Artificial Sequence
  targeting peptide
  misc_feature (1)..(1): Xaa can be any naturally occurring amino acid
  misc_feature (3)..(4): Xaa can be any naturally occurring amino acid
XFXXYLW

SEQ ID NO: 139 - protein, 6 aa, Artificial Sequence
  targeting peptide
RWGLCD

SEQ ID NO: 140 - protein, 13 aa, Artificial Sequence
  targeting peptide
MSRPACPPNDKYE

SEQ ID NO: 141 - protein, 8 aa, Artificial Sequence
  targeting peptide
CLRSGRGC

SEQ ID NO: 142 - protein, 9 aa, Artificial Sequence
  targeting peptide
CHWMFSPWC

SEQ ID NO: 143 - protein, 4 aa, Artificial Sequence
  targeting peptide
  misc_feature (2)..(3): Xaa can be any naturally occurring amino acid
WXXF

SEQ ID NO: 144 - protein, 8 aa, Artificial Sequence
  targeting peptide
CSSRLDAC

SEQ ID NO: 145 - protein, 7 aa, Artificial Sequence
  targeting peptide
CLPVASC

SEQ ID NO: 146 - protein, 13 aa, Artificial Sequence
  targeting peptide
CGFECVRQCPERC

SEQ ID NO: 147 - protein, 13 aa, Artificial Sequence
  targeting peptide
CVALCREACGEGC

SEQ ID NO: 148 - protein, 9 aa, Artificial Sequence
  targeting peptide
SWCEPGWCR

SEQ ID NO: 149 - protein, 6 aa, Artificial Sequence
  targeting peptide
YSGWGW

SEQ ID NO: 150 - protein, 7 aa, Artificial Sequence
  targeting peptide
GLSGGRS

SEQ ID NO: 151 - protein, 7 aa, Artificial Sequence
  targeting peptide
LMLPRAD

SEQ ID NO: 152 - protein, 9 aa, Artificial Sequence
  targeting peptide
CSCFRDVCC

SEQ ID NO: 153 - protein, 9 aa, Artificial Sequence
  targeting peptide
CRDVVSVIC

SEQ ID NO: 154 - protein, 5 aa, Artificial Sequence
  targeting peptide
CNGRC

SEQ ID NO: 155 - protein, 6 aa, Artificial Sequence
  targeting peptide
MARSGL

SEQ ID NO: 156 - protein, 6 aa, Artificial Sequence
  targeting peptide
MARAKE

SEQ ID NO: 157 - protein, 6 aa, Artificial Sequence
  targeting peptide
MSRTMS

SEQ ID NO: 158 - protein, 6 aa, Artificial Sequence
  targeting peptide
KCCYSL

SEQ ID NO: 159 - protein, 14 aa, Artificial Sequence
  targeting peptide
MYWGDSHWLQYWYE

SEQ ID NO: 160 - protein, 7 aa, Artificial Sequence
  targeting peptide
MQLPLAT

SEQ ID NO: 161 - protein, 4 aa, Artificial Sequence
  targeting peptide
EWLS

SEQ ID NO: 162 - protein, 4 aa, Artificial Sequence
  targeting peptide
SNEW

SEQ ID NO: 163 - protein, 4 aa, Artificial Sequence
  targeting peptide
TNYL

SEQ ID NO: 164 - protein, 8 aa, Artificial Sequence
  targeting peptide
WIFPWIQL

SEQ ID NO: 165 - protein, 12 aa, Artificial Sequence
  targeting peptide
WDLAWMFRLPVG

SEQ ID NO: 166 - protein, 13 aa, Artificial Sequence
  targeting peptide
CTVALPGGYVRVC

SEQ ID NO: 167 - protein, 9 aa, Artificial Sequence
  targeting peptide
CVPELGHEC

SEQ ID NO: 168 - protein, 9 aa, Artificial Sequence
  targeting peptide
CGRRAGGSC

SEQ ID NO: 169 - protein, 13 aa, Artificial Sequence
  targeting peptide
CVAYCIEHHCWTC

SEQ ID NO: 170 - protein, 12 aa, Artificial Sequence
  targeting peptide
CVFAHNYDYLVC

SEQ ID NO: 171 - protein, 10 aa, Artificial Sequence
  targeting peptide
CVFTSNYAFC

SEQ ID NO: 172 - protein, 7 aa, Artificial Sequence
  targeting peptide
VHSPNKK

SEQ ID NO: 173 - protein, 9 aa, Artificial Sequence
  targeting peptide
CDCRGDCFC

SEQ ID NO: 174 - protein, 7 aa, Artificial Sequence
  targeting peptide
CRGDGWC

SEQ ID NO: 175 - protein, 6 aa, Artificial Sequence
  targeting peptide
  misc_feature (1)..(1): Xaa can be any naturally occurring amino acid
  misc_feature (6)..(6): Xaa can be any naturally occurring amino acid
XRGCDX

SEQ ID NO: 176 - protein, 4 aa, Artificial Sequence
  targeting peptide
  misc_feature (2)..(3): Xaa can be any naturally occurring amino acid
  misc_feature (4)..(4): Xaa can be Ser or Thr
PXXX

SEQ ID NO: 177 - protein, 10 aa, Artificial Sequence
  targeting peptide
CTTHWGFTLC

SEQ ID NO: 178 - protein, 11 aa, Artificial Sequence
  targeting peptide
SGKGPRQITAL

SEQ ID NO: 179 - protein, 6 aa, Artificial Sequence
  targeting peptide
  misc_feature (2)..(2): Xaa can be Ala or Gln
  misc_feature (3)..(3): Xaa can be Asn or Ala
  misc_feature (4)..(4): Xaa can be Leu or Tyr
  misc_feature (5)..(5): Xaa can be Thr, Val, Met or Arg
  misc_feature (6)..(6): Xaa can be Arg or Lys
AXXXXX

SEQ ID NO: 180 - protein, 6 aa, Artificial Sequence
  targeting peptide
VYMSPF

SEQ ID NO: 181 - protein, 7 aa, Artificial Sequence
  targeting peptide
MQLPLAT

SEQ ID NO: 182 - protein, 7 aa, Artificial Sequence
  targeting peptide
ATWLPPR

SEQ ID NO: 183 - protein, 12 aa, Artificial Sequence
  targeting peptide
HTMYYHHYQHHL

SEQ ID NO: 184 - protein, 19 aa, Artificial Sequence
  targeting peptide
SEVGCRAGPLQWLCEKYFG

SEQ ID NO: 185 - protein, 18 aa, Artificial Sequence
  targeting peptide
CGLLPVGRPDRNVWRWLC

SEQ ID NO: 186 - protein, 15 aa, Artificial Sequence
  targeting peptide
CKGQCDRFKGLPWEC

SEQ ID NO: 187 - protein, 5 aa, Artificial Sequence
  targeting peptide
SGRSA

SEQ ID NO: 188 - protein, 4 aa, Artificial Sequence
  targeting peptide
WGFP

SEQ ID NO: 189 - protein, 5 aa, Artificial Sequence
  targeting peptide
  misc_feature (3)..(4): Xaa can be any naturally occurring amino acid
  misc_feature (5)..(5): Xaa can be Tyr, Trp, Phe or His
LWXXX

SEQ ID NO: 190 - protein, 7 aa, Artificial Sequence
  targeting peptide
  misc_feature (1)..(1): Xaa can be any naturally occurring amino acid
  misc_feature (3)..(4): Xaa can be any naturally occurring amino acid
XFXXYLW

SEQ ID NO: 191 - protein, 17 aa, Artificial Sequence
  targeting peptide
AEPMPHSLNFSQYLWYT

SEQ ID NO: 192 - protein, 6 aa, Artificial Sequence
  targeting peptide
  misc_feature (4)..(4): Xaa can be Trp or Phe
WAYXSP

SEQ ID NO: 193 - protein, 7 aa, Artificial Sequence
  targeting peptide
IELLQAR

SEQ ID NO: 194 - protein, 12 aa, Artificial Sequence
  targeting peptide
DITWDQLWDLMK

SEQ ID NO: 195 - protein, 16 aa, Artificial Sequence
  targeting peptide
AYTKCSRQWRTCMTTH

SEQ ID NO: 196 - protein, 15 aa, Artificial Sequence
  targeting peptide
PQNSKIPGPTFLDPH

SEQ ID NO: 197 - protein, 15 aa, Artificial Sequence
  targeting peptide
SMEPALPDWWWKMFK

SEQ ID NO: 198 - protein, 16 aa, Artificial Sequence
  targeting peptide
ANTPCGPYTHDCPVKR

SEQ ID NO: 199 - protein, 12 aa, Artificial Sequence
  targeting peptide
TACHQHVRMVRP

SEQ ID NO: 200 - protein, 12 aa, Artificial Sequence
  targeting peptide
VPWMEPAYQRFL

SEQ ID NO: 201 - protein, 8 aa, Artificial Sequence
  targeting peptide
DPRATPGS

SEQ ID NO: 202 - protein, 12 aa, Artificial Sequence
  targeting peptide
FRPNRAQDYNTN

SEQ ID NO: 203 - protein, 9 aa, Artificial Sequence
  targeting peptide
CTKNSYLMC

SEQ ID NO: 204 - protein, 11 aa, Artificial Sequence
  targeting peptide
  misc_feature (2)..(2): Xaa can be Arg or Gln
  misc_feature (3)..(3): Xaa can be Leu or Arg
  misc_feature (5)..(5): Xaa can be Gly or Asn
  misc_feature (6)..(7): Xaa can be any naturally occurring amino acid
  misc_feature (9)..(9): Xaa can be Ala or Val
CXXTXXXGXGC

SEQ ID NO: 205 - protein, 9 aa, Artificial Sequence
  targeting peptide
CPIEDRPMC

SEQ ID NO: 206 - protein, 12 aa, Artificial Sequence
  targeting peptide
HEWSYLAPYPWF

SEQ ID NO: 207 - protein, 9 aa, Artificial Sequence
  targeting peptide
MCPKHPLGC

SEQ ID NO: 208 - protein, 15 aa, Artificial Sequence
  targeting peptide
RMWPSSTVNLSAGRR

SEQ ID NO: 209 - protein, 20 aa, Artificial Sequence
  targeting peptide
SAKTAVSQRVWLPSHRGGEP

SEQ ID NO: 210 - protein, 20 aa, Artificial Sequence
  targeting peptide
KSREHVNNSACPSKRITAAL

SEQ ID NO: 211 - protein, 4 aa, Artificial Sequence
  targeting peptide
EGFR

SEQ ID NO: 212 - protein, 6 aa, Artificial Sequence
  targeting peptide
AGLGVR

SEQ ID NO: 213 - protein, 15 aa, Artificial Sequence
  targeting peptide
GTRQGHTMRLGVSDG

SEQ ID NO: 214 - protein, 15 aa, Artificial Sequence
  targeting peptide
IAGLATPGWSHWLAL

SEQ ID NO: 215 - protein, 7 aa, Artificial Sequence
  targeting peptide
SMSIARL

SEQ ID NO: 216 - protein, 7 aa, Artificial Sequence
  targeting peptide
HTFEPGV

SEQ ID NO: 217 - protein, 15 aa, Artificial Sequence
  targeting peptide
NTSLKRISNKRIRRK

SEQ ID NO: 218 - protein, 15 aa, Artificial Sequence
  targeting peptide
LRIKRKRRKRKKTRK

SEQ ID NO: 219-296 - skipped (78 entries)

SEQ ID NO: 297 - protein, 8 aa, Artificial Sequence
  AAV capsid protein amino acid substitution
VVGNGGVV

SEQ ID NO: 298 - protein, 8 aa, Artificial Sequence
  AAV capsid protein amino acid substitution
NFREMPIG

SEQ ID NO: 299 - protein, 9 aa, Artificial Sequence
  AAV capsid protein amino acid substitution
RRSEDMGTI

SEQ ID NO: 300 - protein, 738 aa, Artificial Sequence
  AAV capsid variant
MAADGYLPDWLEDNLSEGIREWWALKPGAPKPKANQQKQDDGRGLVLPGYKYLGPFNGLDKGEPVNAADAAALEHDKAYDQQLQAGDNPYLRYNHADAEFQERLQEDTSFGGNLGRAVFQAKKRVLEPLGLVEEGAKTAPGKKRPVEPSPQRSPDSSTGIGKKGQQPARKRLNFGQTGDSESVPDPQPLGEPPAAPSGVGPNTMAAGGGAPMADNNEGADGVGSSSGNWHCDSTWLGDRVITTSTRTWALPTYNNHLYKQISNGTSGGATNDNTYFGYSTPWGYFDFNRFHCHFSPRDWQRLINNNWGFRPKRLSFKLFNIQVKEVTQNEGTKTIANNLTSTIQVFTDSEYQLPYVLGSAHQGCLPPFPADVFMIPQYGYLTLNNGSQAVGRSSFYCLEYFPSQMLRTGNNFQFTYTFEDVPFHSSYAHSQSLDRLMNPLIDQYLYYLSRTQTTGGTANTQTLGFSQGGPNTMANQAKNWLPGPCYRQQRVSTVVGNGGVVNFAWTAGTKYHLNGRNSLANPGIAMATHKDDEERFFPSNGILIFGKQNAARDNADYSDVMLTSEEEIKTTNPVATEEYGIVADNLQQQNTAPQIGTVNSQGALPGMVWQNRDVYLQGPIWAKIPHTDGNFHPSPLMGGFGLKHPPPQILIKNTPVPADPPTTFNQSKLNSFITQYSTGQVSVEIEWELQKENSKRWNPEIQYTSNYYKSTSVDFAVNTEGVYSEPRPIGTRYLTRNL

SEQ ID NO: 301 - protein, 738 aa, Artificial Sequence
  AAV capsid variant
MAADGYLPDWLEDNLSEGIREWWALKPGAPKPKANQQKQDDGRGLVLPGYKYLGPFNGLDKGEPVNAADAAALEHDKAYDQQLQAGDNPYLRYNHADAEFQERLQEDTSFGGNLGRAVFQAKKRVLEPLGLVEEGAKTAPGKKRPVEPSPQRSPDSSTGIGKKGQQPARKRLNFGQTGDSESVPDPQPLGEPPAAPSGVGPNTMAAGGGAPMADNNEGADGVGSSSGNWHCDSTWLGDRVITTSTRTWALPTYNNHLYKQISNGTSGGATNDNTYFGYSTPWGYFDFNRFHCHFSPRDWQRLINNNWGFRPKRLSFKLFNIQVKEVTQNEGTKTIANNLTSTIQVFTDSEYQLPYVLGSAHQGCLPPFPADVFMIPQYGYLTLNNGSQAVGRSSFYCLEYFPSQMLRTGNNFQFTYTFEDVPFHSSYAHSQSLDRLMNPLIDQYLYYLSRTQTTGGTANTQTLGFSQGGPNTMANQAKNWLPGPCYRQQRVSTNFREMPIGNFAWTAGTKYHLNGRNSLANPGIAMATHKDDEERFFPSNGILIFGKQNAARDNADYSDVMLTSEEEIKTTNPVATEEYGIVADNLQQQNTAPQIGTVNSQGALPGMVWQNRDVYLQGPIWAKIPHTDGNFHPSPLMGGFGLKHPPPQILIKNTPVPADPPTTFNQSKLNSFITQYSTGQVSVEIEWELQKENSKRWNPEIQYTSNYYKSTSVDFAVNTEGVYSEPRPIGTRYLTRNL

SEQ ID NO: 302 - protein, 739 aa, Artificial Sequence
  AAV capsid variant
MAADGYLPDWLEDNLSEGIREWWALKPGAPKPKANQQKQDDGRGLVLPGYKYLGPFNGLDKGEPVNAADAAALEHDKAYDQQLQAGDNPYLRYNHADAEFQERLQEDTSFGGNLGRAVFQAKKRVLEPLGLVEEGAKTAPGKKRPVEPSPQRSPDSSTGIGKKGQQPARKRLNFGQTGDSESVPDPQPLGEPPAAPSGVGPNTMAAGGGAPMADNNEGADGVGSSSGNWHCDSTWLGDRVITTSTRTWALPTYNNHLYKQISNGTSGGATNDNTYFGYSTPWGYFDFNRFHCHFSPRDWQRLINNNWGFRPKRLSFKLFNIQVKEVTQNEGTKTIANNLTSTIQVFTDSEYQLPYVLGSAHQGCLPPFPADVFMIPQYGYLTLNNGSQAVGRSSFYCLEYFPSQMLRTGNNFQFTYTFEDVPFHSSYAHSQSLDRLMNPLIDQYLYYLSRTQTTGGTANTQTLGFSQGGPNTMANQAKNWLPGPCYRQQRVSTRRSEDMGTINFAWTAGTKYHLNGRNSLANPGIAMATHKDDEERFFPSNGILIFGKQNAARDNADYSDVMLTSEEEIKTTNPVATEEYGIVADNLQQQNTAPQIGTVNSQGALPGMVWQNRDVYLQGPIWAKIPHTDGNFHPSPLMGGFGLKHPPPQILIKNTPVPADPPTTFNQSKLNSFITQYSTGQVSVEIEWELQKENSKRWNPEIQYTSNYYKSTSVDFAVNTEGVYSEPRPIGTRYLTRNL

SEQ ID NO: 303 - protein, 737 aa, Artificial Sequence
  AAV capsid variant
MAADGYLPDWLEDNLSEGIREWWALKPGAPKPKANQQKQDDGRGLVLPGYKYLGPFNGLDKGEPVNAADAAALEHDKAYDQQLQAGDNPYLRYNHADAEFQERLQEDTSFGGNLGRAVFQAKKRVLEPLGLVEEGAKTAPGKKRPVEPSPQRSPDSSTGIGKKGQQPARKRLNFGQTGDSESVPDPQPLGEPPAAPSGVGPNTMAAGGGAPMADNNEGADGVGSSSGNWHCDSTWLGDRVITTSTRTWALPTYNNHLYKQISNGTSGGATNDNTYFGYSTPWGYFDFNRFHCHFSPRDWQRLINNNWGFRPKRLSFKLFNIQVKEVTQNEGTKTIANNLTSTIQVFTDSEYQLPYVLGSAHQGCLPPFPADVFMIPQYGYLTLNNGSQAVGRSSFYCLEYFPSQMLRTGNNFQFTYTFEDVPFHSSYAHSQSLDRLMNPLIDQYLYYLSRTQTTSNGRGVTLGFSQGGPNTMANQAKNWLPGPCYRQQRVSTVVGNGGVVNFAWTAGTKYHLNGRNSLANPGIAMATHKDDEERFFPSNGILIFGKQNAARDNADYSDVMLTSEEEIKTTNPVATEEYGIVADNLQQQNTAPQIGTVNSQGALPGMVWQNRDVYLQGPIWAKIPHTDGNFHPSPLMGGFGLKHPPPQILIKNTPVPADPPTTFNQSKLNSFITQYSTGQVSVEIEWELQKENSKRWNPEIQYTSNYYKSTSVDFAVNTEGVYSEPRPIGTRYLTRNL

SEQ ID NO: 304 - protein, 737 aa, Artificial Sequence
  AAV capsid variant
MAADGYLPDWLEDNLSEGIREWWALKPGAPKPKANQQKQDDGRGLVLPGYKYLGPFNGLDKGEPVNAADAAALEHDKAYDQQLQAGDNPYLRYNHADAEFQERLQEDTSFGGNLGRAVFQAKKRVLEPLGLVEEGAKTAPGKKRPVEPSPQRSPDSSTGIGKKGQQPARKRLNFGQTGDSESVPDPQPLGEPPAAPSGVGPNTMAAGGGAPMADNNEGADGVGSSSGNWHCDSTWLGDRVITTSTRTWALPTYNNHLYKQISNGTSGGATNDNTYFGYSTPWGYFDFNRFHCHFSPRDWQRLINNNWGFRPKRLSFKLFNIQVKEVTQNEGTKTIANNLTSTIQVFTDSEYQLPYVLGSAHQGCLPPFPADVFMIPQYGYLTLNNGSQAVGRSSFYCLEYFPSQMLRTGNNFQFTYTFEDVPFHSSYAHSQSLDRLMNPLIDQYLYYLSRTQTTSNGRGVTLGFSQGGPNTMANQAKNWLPGPCYRQQRVSTNFREMPIGNFAWTAGTKYHLNGRNSLANPGIAMATHKDDEERFFPSNGILIFGKQNAARDNADYSDVMLTSEEEIKTTNPVATEEYGIVADNLQQQNTAPQIGTVNSQGALPGMVWQNRDVYLQGPIWAKIPHTDGNFHPSPLMGGFGLKHPPPQILIKNTPVPADPPTTFNQSKLNSFITQYSTGQVSVEIEWELQKENSKRWNPEIQYTSNYYKSTSVDFAVNTEGVYSEPRPIGTRYLTRNL

SEQ ID NO: 305 - protein, 738 aa, Artificial Sequence
  AAV capsid variant
MAADGYLPDWLEDNLSEGIREWWALKPGAPKPKANQQKQDDGRGLVLPGYKYLGPFNGLDKGEPVNAADAAALEHDKAYDQQLQAGDNPYLRYNHADAEFQERLQEDTSFGGNLGRAVFQAKKRVLEPLGLVEEGAKTAPGKKRPVEPSPQRSPDSSTGIGKKGQQPARKRLNFGQTGDSESVPDPQPLGEPPAAPSGVGPNTMAAGGGAPMADNNEGADGVGSSSGNWHCDSTWLGDRVITTSTRTWALPTYNNHLYKQISNGTSGGATNDNTYFGYSTPWGYFDFNRFHCHFSPRDWQRLINNNWGFRPKRLSFKLFNIQVKEVTQNEGTKTIANNLTSTIQVFTDSEYQLPYVLGSAHQGCLPPFPADVFMIPQYGYLTLNNGSQAVGRSSFYCLEYFPSQMLRTGNNFQFTYTFEDVPFHSSYAHSQSLDRLMNPLIDQYLYYLSRTQTTSNGRGVTLGFSQGGPNTMANQAKNWLPGPCYRQQRVSTRRSEDMGTINFAWTAGTKYHLNGRNSLANPGIAMATHKDDEERFFPSNGILIFGKQNAARDNADYSDVMLTSEEEIKTTNPVATEEYGIVADNLQQQNTAPQIGTVNSQGALPGMVWQNRDVYLQGPIWAKIPHTDGNFHPSPLMGGFGLKHPPPQILIKNTPVPADPPTTFNQSKLNSFITQYSTGQVSVEIEWELQKENSKRWNPEIQYTSNYYKSTSVDFAVNTEGVYSEPRPIGTRYLTRNL

SEQ ID NO: 306 - protein, 738 aa, Artificial Sequence
  AAV capsid variant
MAADGYLPDWLEDNLSEGIREWWALKPGAPKPKANQQKQDDGRGLVLPGYKYLGPFNGLDKGEPVNAADAAALEHDKAYDQQLQAGDNPYLRYNHADAEFQERLQEDTSFGGNLGRAVFQAKKRVLEPLGLVEEGAKTAPGKKRPVEPSPQRSPDSSTGIGKKGQQPARKRLNFGQTGDSESVPDPQPLGEPPAAPSGVGPNTMAAGGGAPMADNNEGADGVGSSSGNWHCDSTWLGDRVITTSTRTWALPTYNNHLYKQISNGTSGGATNDNTYFGYSTPWGYFDFNRFHCHFSPRDWQRLINNNWGFRPKRLSFKLFNIQVKEVTQNEGTKTIANNLTSTIQVFTDSEYQLPYVLGSAHQGCLPPFPADVFMIPQYGYLTLNNGSQAVGRSSFYCLEYFPSQMLRTGNNFQFTYTFEDVPFHSSYAHSQSLDRLMNPLIDQYLYYLSRTQTTGGTANTQTLGFSQGGPNTMANQAKNWLPGPCYRQQRVSTVVGNGGVVNFAWTAGTKYHLNGRNSLANPGIAMATHKDDEERFFPSNGILIFGKQNAARDNADYSDVMLTSEEEIKTTNPVATEEYGIVADNVMEPTRAPQIGTVNSQGALPGMVWQNRDVYLQGPIWAKIPHTDGNFHPSPLMGGFGLKHPPPQILIKNTPVPADPPTTFNQSKLNSFITQYSTGQVSVEIEWELQKENSKRWNPEIQYTSNYYKSTSVDFAVNTEGVYSEPRPIGTRYLTRNL

SEQ ID NO: 307 - protein, 738 aa, Artificial Sequence
  AAV capsid variant
MAADGYLPDWLEDNLSEGIREWWALKPGAPKPKANQQKQDDGRGLVLPGYKYLGPFNGLDKGEPVNAADAAALEHDKAYDQQLQAGDNPYLRYNHADAEFQERLQEDTSFGGNLGRAVFQAKKRVLEPLGLVEEGAKTAPGKKRPVEPSPQRSPDSSTGIGKKGQQPARKRLNFGQTGDSESVPDPQPLGEPPAAPSGVGPNTMAAGGGAPMADNNEGADGVGSSSGNWHCDSTWLGDRVITTSTRTWALPTYNNHLYKQISNGTSGGATNDNTYFGYSTPWGYFDFNRFHCHFSPRDWQRLINNNWGFRPKRLSFKLFNIQVKEVTQNEGTKTIANNLTSTIQVFTDSEYQLPYVLGSAHQGCLPPFPADVFMIPQYGYLTLNNGSQAVGRSSFYCLEYFPSQMLRTGNNFQFTYTFEDVPFHSSYAHSQSLDRLMNPLIDQYLYYLSRTQTTGGTANTQTLGFSQGGPNTMANQAKNWLPGPCYRQQRVSTNFREMPIGNFAWTAGTKYHLNGRNSLANPGIAMATHKDDEERFFPSNGILIFGKQNAARDNADYSDVMLTSEEEIKTTNPVATEEYGIVADNVMEPTRAPQIGTVNSQGALPGMVWQNRDVYLQGPIWAKIPHTDGNFHPSPLMGGFGLKHPPPQILIKNTPVPADPPTTFNQSKLNSFITQYSTGQVSVEIEWELQKENSKRWNPEIQYTSNYYKSTSVDFAVNTEGVYSEPRPIGTRYLTRNL

SEQ ID NO: 308 - protein, 739 aa, Artificial Sequence
  AAV capsid variant
MAADGYLPDWLEDNLSEGIREWWALKPGAPKPKANQQKQDDGRGLVLPGYKYLGPFNGLDKGEPVNAADAAALEHDKAYDQQLQAGDNPYLRYNHADAEFQERLQEDTSFGGNLGRAVFQAKKRVLEPLGLVEEGAKTAPGKKRPVEPSPQRSPDSSTGIGKKGQQPARKRLNFGQTGDSESVPDPQPLGEPPAAPSGVGPNTMAAGGGAPMADNNEGADGVGSSSGNWHCDSTWLGDRVITTSTRTWALPTYNNHLYKQISNGTSGGATNDNTYFGYSTPWGYFDFNRFHCHFSPRDWQRLINNNWGFRPKRLSFKLFNIQVKEVTQNEGTKTIANNLTSTIQVFTDSEYQLPYVLGSAHQGCLPPFPADVFMIPQYGYLTLNNGSQAVGRSSFYCLEYFPSQMLRTGNNFQFTYTFEDVPFHSSYAHSQSLDRLMNPLIDQYLYYLSRTQTTGGTANTQTLGFSQGGPNTMANQAKNWLPGPCYRQQRVSTRRSEDMGTINFAWTAGTKYHLNGRNSLANPGIAMATHKDDEERFFPSNGILIFGKQNAARDNADYSDVMLTSEEEIKTTNPVATEEYGIVADNVMEPTRAPQIGTVNSQGALPGMVWQNRDVYLQGPIWAKIPHTDGNFHPSPLMGGFGLKHPPPQILIKNTPVPADPPTTFNQSKLNSFITQYSTGQVSVEIEWELQKENSKRWNPEIQYTSNYYKSTSVDFAVNTEGVYSEPRPIGTRYLTRNL

SEQ ID NO: 309 - protein, 737 aa, Artificial Sequence
  AAV capsid variant
MAADGYLPDWLEDNLSEGIREWWALKPGAPKPKANQQKQDDGRGLVLPGYKYLGPFNGLDKGEPVNAADAAALEHDKAYDQQLQAGDNPYLRYNHADAEFQERLQEDTSFGGNLGRAVFQAKKRVLEPLGLVEEGAKTAPGKKRPVEPSPQRSPDSSTGIGKKGQQPARKRLNFGQTGDSESVPDPQPLGEPPAAPSGVGPNTMAAGGGAPMADNNEGADGVGSSSGNWHCDSTWLGDRVITTSTRTWALPTYNNHLYKQISNGTSGGATNDNTYFGYSTPWGYFDFNRFHCHFSPRDWQRLINNNWGFRPKRLSFKLFNIQVKEVTQNEGTKTIANNLTSTIQVFTDSEYQLPYVLGSAHQGCLPPFPADVFMIPQYGYLTLNNGSQAVGRSSFYCLEYFPSQMLRTGNNFQFTYTFEDVPFHSSYAHSQSLDRLMNPLIDQYLYYLSRTQTTSNGRGVTLGFSQGGPNTMANQAKNWLPGPCYRQQRVSTVVGNGGVVNFAWTAGTKYHLNGRNSLANPGIAMATHKDDEERFFPSNGILIFGKQNAARDNADYSDVMLTSEEEIKTTNPVATEEYGIVADNVMEPTRAPQIGTVNSQGALPGMVWQNRDVYLQGPIWAKIPHTDGNFHPSPLMGGFGLKHPPPQILIKNTPVPADPPTTFNQSKLNSFITQYSTGQVSVEIEWELQKENSKRWNPEIQYTSNYYKSTSVDFAVNTEGVYSEPRPIGTRYLTRNL

SEQ ID NO: 310 - protein, 737 aa, Artificial Sequence
  AAV capsid variant
MAADGYLPDWLEDNLSEGIREWWALKPGAPKPKANQQKQDDGRGLVLPGYKYLGPFNGLDKGEPVNAADAAALEHDKAYDQQLQAGDNPYLRYNHADAEFQERLQEDTSFGGNLGRAVFQAKKRVLEPLGLVEEGAKTAPGKKRPVEPSPQRSPDSSTGIGKKGQQPARKRLNFGQTGDSESVPDPQPLGEPPAAPSGVGPNTMAAGGGAPMADNNEGADGVGSSSGNWHCDSTWLGDRVITTSTRTWALPTYNNHLYKQISNGTSGGATNDNTYFGYSTPWGYFDFNRFHCHFSPRDWQRLINNNWGFRPKRLSFKLFNIQVKEVTQNEGTKTIANNLTSTIQVFTDSEYQLPYVLGSAHQGCLPPFPADVFMIPQYGYLTLNNGSQAVGRSSFYCLEYFPSQMLRTGNNFQFTYTFEDVPFHSSYAHSQSLDRLMNPLIDQYLYYLSRTQTTSNGRGVTLGFSQGGPNTMANQAKNWLPGPCYRQQRVSTNFREMPIGNFAWTAGTKYHLNGRNSLANPGIAMATHKDDEERFFPSNGILIFGKQNAARDNADYSDVMLTSEEEIKTTNPVATEEYGIVADNVMEPTRAPQIGTVNSQGALPGMVWQNRDVYLQGPIWAKIPHTDGNFHPSPLMGGFGLKHPPPQILIKNTPVPADPPTTFNQSKLNSFITQYSTGQVSVEIEWELQKENSKRWNPEIQYTSNYYKSTSVDFAVNTEGVYSEPRPIGTRYLTRNL

SEQ ID NO: 311 - protein, 738 aa, Artificial Sequence
  AAV capsid variant
MAADGYLPDWLEDNLSEGIREWWALKPGAPKPKANQQKQDDGRGLVLPGYKYLGPFNGLDKGEPVNAADAAALEHDKAYDQQLQAGDNPYLRYNHADAEFQERLQEDTSFGGNLGRAVFQAKKRVLEPLGLVEEGAKTAPGKKRPVEPSPQRSPDSSTGIGKKGQQPARKRLNFGQTGDSESVPDPQPLGEPPAAPSGVGPNTMAAGGGAPMADNNEGADGVGSSSGNWHCDSTWLGDRVITTSTRTWALPTYNNHLYKQISNGTSGGATNDNTYFGYSTPWGYFDFNRFHCHFSPRDWQRLINNNWGFRPKRLSFKLFNIQVKEVTQNEGTKTIANNLTSTIQVFTDSEYQLPYVLGSAHQGCLPPFPADVFMIPQYGYLTLNNGSQAVGRSSFYCLEYFPSQMLRTGNNFQFTYTFEDVPFHSSYAHSQSLDRLMNPLIDQYLYYLSRTQTTSNGRGVTLGFSQGGPNTMANQAKNWLPGPCYRQQRVSTRRSEDMGTINFAWTAGTKYHLNGRNSLANPGIAMATHKDDEERFFPSNGILIFGKQNAARDNADYSDVMLTSEEEIKTTNPVATEEYGIVADNVMEPTRAPQIGTVNSQGALPGMVWQNRDVYLQGPIWAKIPHTDGNFHPSPLMGGFGLKHPPPQILIKNTPVPADPPTTFNQSKLNSFITQYSTGQVSVEIEWELQKENSKRWNPEIQYTSNYYKSTSVDFAVNTEGVYSEPRPIGTRYLTRNL

SEQ ID NO: 312 - protein, 737 aa, Artificial Sequence
  AAV capsid variant
MAADGYLPDWLEDNLSEGIREWWALKPGAPQPKANQQHQDNARGLVLPGYKYLGPGNGLDKGEPVNAADAAALEHDKAYDQQLKAGDNPYLKYNHADAEFQERLKEDTSFGGNLGRAVFQAKKRLLEPLGLVEEAAKTAPGKKRPVEQSPQEPDSSAGIGKSGAQPAKKRLNFGQTGDSESVPDPQPLGEPPAAPSGVGPNTMAAGGGAPMADNNEGADGVGSSSGNWHCDSTWLGDRVITTSTRTWALPTYNNHLYKQISNGTSGGATNDNTYFGYSTPWGYFDFNRFHCHFSPRDWQRLINNNWGFRPKRLSFKLFNIQVKEVTQNEGTKTIANNLTSTIQVFTDSEYQLPYVLGSAHQGCLPPFPADVFMIPQYGYLTLNNGSQAVGRSSFYCLEYFPSQMLRTGNNFQFTYTFEDVPFHSSYAHSQSLDRLMNPLIDQYLYYLSRTQTTGGTANTQTLGFSQGGPNTMANQAKNWLPGPCYRQQRVSTVVGNGGVVNFAWTAGTKYHLNGRNSLANPGIAMATHKDDEERFFPSNGILIFGKQNAARDNADYSDVMLTSEEEIKTTNPVATEEYGIVADNLQQQNTAPQIGTVNSQGALPGMVWQNRDVYLQGPIWAKIPHTDGNFHPSPLMGGFGLKHPPPQILIKNTPVPADPPTTFNQSKLNSFITQYSTGQVSVEIEWELQKENSKRWNPEIQYTSNYYKSTSVDFAVNTEGVYSEPRPIGTRYLTRNL

SEQ ID NO: 313 - protein, 737 aa, Artificial Sequence
  AAV capsid variant
MAADGYLPDWLEDNLSEGIREWWALKPGAPQPKANQQHQDNARGLVLPGYKYLGPGNGLDKGEPVNAADAAALEHDKAYDQQLKAGDNPYLKYNHADAEFQERLKEDTSFGGNLGRAVFQAKKRLLEPLGLVEEAAKTAPGKKRPVEQSPQEPDSSAGIGKSGAQPAKKRLNFGQTGDSESVPDPQPLGEPPAAPSGVGPNTMAAGGGAPMADNNEGADGVGSSSGNWHCDSTWLGDRVITTSTRTWALPTYNNHLYKQISNGTSGGATNDNTYFGYSTPWGYFDFNRFHCHFSPRDWQRLINNNWGFRPKRLSFKLFNIQVKEVTQNEGTKTIANNLTSTIQVFTDSEYQLPYVLGSAHQGCLPPFPADVFMIPQYGYLTLNNGSQAVGRSSFYCLEYFPSQMLRTGNNFQFTYTFEDVPFHSSYAHSQSLDRLMNPLIDQYLYYLSRTQTTGGTANTQTLGFSQGGPNTMANQAKNWLPGPCYRQQRVSTNFREMPIGNFAWTAGTKYHLNGRNSLANPGIAMATHKDDEERFFPSNGILIFGKQNAARDNADYSDVMLTSEEEIKTTNPVATEEYGIVADNLQQQNTAPQIGTVNSQGALPGMVWQNRDVYLQGPIWAKIPHTDGNFHPSPLMGGFGLKHPPPQILIKNTPVPADPPTTFNQSKLNSFITQYSTGQVSVEIEWELQKENSKRWNPEIQYTSNYYKSTSVDFAVNTEGVYSEPRPIGTRYLTRNL

SEQ ID NO: 314 - protein, 738 aa, Artificial Sequence
  AAV capsid variant
MAADGYLPDWLEDNLSEGIREWWALKPGAPQPKANQQHQDNARGLVLPGYKYLGPGNGLDKGEPVNAADAAALEHDKAYDQQLKAGDNPYLKYNHADAEFQERLKEDTSFGGNLGRAVFQAKKRLLEPLGLVEEAAKTAPGKKRPVEQSPQEPDSSAGIGKSGAQPAKKRLNFGQTGDSESVPDPQPLGEPPAAPSGVGPNTMAAGGGAPMADNNEGADGVGSSSGNWHCDSTWLGDRVITTSTRTWALPTYNNHLYKQISNGTSGGATNDNTYFGYSTPWGYFDFNRFHCHFSPRDWQRLINNNWGFRPKRLSFKLFNIQVKEVTQNEGTKTIANNLTSTIQVFTDSEYQLPYVLGSAHQGCLPPFPADVFMIPQYGYLTLNNGSQAVGRSSFYCLEYFPSQMLRTGNNFQFTYTFEDVPFHSSYAHSQSLDRLMNPLIDQYLYYLSRTQTTGGTANTQTLGFSQGGPNTMANQAKNWLPGPCYRQQRVSTRRSEDMGTINFAWTAGTKYHLNGRNSLANPGIAMATHKDDEERFFPSNGILIFGKQNAARDNADYSDVMLTSEEEIKTTNPVATEEYGIVADNLQQQNTAPQIGTVNSQGALPGMVWQNRDVYLQGPIWAKIPHTDGNFHPSPLMGGFGLKHPPPQILIKNTPVPADPPTTFNQSKLNSFITQYSTGQVSVEIEWELQKENSKRWNPEIQYTSNYYKSTSVDFAVNTEGVYSEPRPIGTRYLTRNL

SEQ ID NO: 315 - protein, 736 aa, Artificial Sequence
  AAV capsid variant
MAADGYLPDWLEDNLSEGIREWWALKPGAPQPKANQQHQDNARGLVLPGYKYLGPGNGLDKGEPVNAADAAALEHDKAYDQQLKAGDNPYLKYNHADAEFQERLKEDTSFGGNLGRAVFQAKKRLLEPLGLVEEAAKTAPGKKRPVEQSPQEPDSSAGIGKSGAQPAKKRLNFGQTGDSESVPDPQPLGEPPAAPSGVGPNTMAAGGGAPMADNNEGADGVGSSSGNWHCDSTWLGDRVITTSTRTWALPTYNNHLYKQISNGTSGGATNDNTYFGYSTPWGYFDFNRFHCHFSPRDWQRLINNNWGFRPKRLSFKLFNIQVKEVTQNEGTKTIANNLTSTIQVFTDSEYQLPYVLGSAHQGCLPPFPADVFMIPQYGYLTLNNGSQAVGRSSFYCLEYFPSQMLRTGNNFQFTYTFEDVPFHSSYAHSQSLDRLMNPLIDQYLYYLSRTQTTSNGRGVTLGFSQGGPNTMANQAKNWLPGPCYRQQRVSTVVGNGGVVNFAWTAGTKYHLNGRNSLANPGIAMATHKDDEERFFPSNGILIFGKQNAARDNADYSDVMLTSEEEIKTTNPVATEEYGIVADNLQQQNTAPQIGTVNSQGALPGMVWQNRDVYLQGPIWAKIPHTDGNFHPSPLMGGFGLKHPPPQILIKNTPVPADPPTTFNQSKLNSFITQYSTGQVSVEIEWELQKENSKRWNPEIQYTSNYYKSTSVDFAVNTEGVYSEPRPIGTRYLTRNL

SEQ ID NO: 316 - protein, 736 aa, Artificial Sequence
  AAV capsid variant
MAADGYLPDWLEDNLSEGIREWWALKPGAPQPKANQQHQDNARGLVLPGYKYLGPGNGLDKGEPVNAADAAALEHDKAYDQQLKAGDNPYLKYNHADAEFQERLKEDTSFGGNLGRAVFQAKKRLLEPLGLVEEAAKTAPGKKRPVEQSPQEPDSSAGIGKSGAQPAKKRLNFGQTGDSESVPDPQPLGEPPAAPSGVGPNTMAAGGGAPMADNNEGADGVGSSSGNWHCDSTWLGDRVITTSTRTWALPTYNNHLYKQISNGTSGGATNDNTYFGYSTPWGYFDFNRFHCHFSPRDWQRLINNNWGFRPKRLSFKLFNIQVKEVTQNEGTKTIANNLTSTIQVFTDSEYQLPYVLGSAHQGCLPPFPADVFMIPQYGYLTLNNGSQAVGRSSFYCLEYFPSQMLRTGNNFQFTYTFEDVPFHSSYAHSQSLDRLMNPLIDQYLYYLSRTQTTSNGRGVTLGFSQGGPNTMANQAKNWLPGPCYRQQRVSTNFREMPIGNFAWTAGTKYHLNGRNSLANPGIAMATHKDDEERFFPSNGILIFGKQNAARDNADYSDVMLTSEEEIKTTNPVATEEYGIVADNLQQQNTAPQIGTVNSQGALPGMVWQNRDVYLQGPIWAKIPHTDGNFHPSPLMGGFGLKHPPPQILIKNTPVPADPPTTFNQSKLNSFITQYSTGQVSVEIEWELQKENSKRWNPEIQYTSNYYKSTSVDFAVNTEGVYSEPRPIGTRYLTRNL

SEQ ID NO: 317 - protein, 737 aa, Artificial Sequence
  AAV capsid variant
MAADGYLPDWLEDNLSEGIREWWALKPGAPQPKANQQHQDNARGLVLPGYKYLGPGNGLDKGEPVNAADAAALEHDKAYDQQLKAGDNPYLKYNHADAEFQERLKEDTSFGGNLGRAVFQAKKRLLEPLGLVEEAAKTAPGKKRPVEQSPQEPDSSAGIGKSGAQPAKKRLNFGQTGDSESVPDPQPLGEPPAAPSGVGPNTMAAGGGAPMADNNEGADGVGSSSGNWHCDSTWLGDRVITTSTRTWALPTYNNHLYKQISNGTSGGATNDNTYFGYSTPWGYFDFNRFHCHFSPRDWQRLINNNWGFRPKRLSFKLFNIQVKEVTQNEGTKTIANNLTSTIQVFTDSEYQLPYVLGSAHQGCLPPFPADVFMIPQYGYLTLNNGSQAVGRSSFYCLEYFPSQMLRTGNNFQFTYTFEDVPFHSSYAHSQSLDRLMNPLIDQYLYYLSRTQTTSNGRGVTLGFSQGGPNTMANQAKNWLPGPCYRQQRVSTRRSEDMGTINFAWTAGTKYHLNGRNSLANPGIAMATHKDDEERFFPSNGILIFGKQNAARDNADYSDVMLTSEEEIKTTNPVATEEYGIVADNLQQQNTAPQIGTVNSQGALPGMVWQNRDVYLQGPIWAKIPHTDGNFHPSPLMGGFGLKHPPPQILIKNTPVPADPPTTFNQSKLNSFITQYSTGQVSVEIEWELQKENSKRWNPEIQYTSNYYKSTSVDFAVNTEGVYSEPRPIGTRYLTRNL

SEQ ID NO: 318 - protein, 737 aa, Artificial Sequence
  AAV capsid variant
MAADGYLPDWLEDNLSEGIREWWALKPGAPQPKANQQHQDNARGLVLPGYKYLGPGNGLDKGEPVNAADAAALEHDKAYDQQLKAGDNPYLKYNHADAEFQERLKEDTSFGGNLGRAVFQAKKRLLEPLGLVEEAAKTAPGKKRPVEQSPQEPDSSAGIGKSGAQPAKKRLNFGQTGDSESVPDPQPLGEPPAAPSGVGPNTMAAGGGAPMADNNEGADGVGSSSGNWHCDSTWLGDRVITTSTRTWALPTYNNHLYKQISNGTSGGATNDNTYFGYSTPWGYFDFNRFHCHFSPRDWQRLINNNWGFRPKRLSFKLFNIQVKEVTQNEGTKTIANNLTSTIQVFTDSEYQLPYVLGSAHQGCLPPFPADVFMIPQYGYLTLNNGSQAVGRSSFYCLEYFPSQMLRTGNNFQFTYTFEDVPFHSSYAHSQSLDRLMNPLIDQYLYYLSRTQTTGGTANTQTLGFSQGGPNTMANQAKNWLPGPCYRQQRVSTVVGNGGVVNFAWTAGTKYHLNGRNSLANPGIAMATHKDDEERFFPSNGILIFGKQNAARDNADYSDVMLTSEEEIKTTNPVATEEYGIVADNVMEPTRAPQIGTVNSQGALPGMVWQNRDVYLQGPIWAKIPHTDGNFHPSPLMGGFGLKHPPPQILIKNTPVPADPPTTFNQSKLNSFITQYSTGQVSVEIEWELQKENSKRWNPEIQYTSNYYKSTSVDFAVNTEGVYSEPRPIGTRYLTRNL

SEQ ID NO: 319 - protein, 737 aa, Artificial Sequence
  AAV capsid variant
MAADGYLPDWLEDNLSEGIREWWALKPGAPQPKANQQHQDNARGLVLPGYKYLGPGNGLDKGEPVNAADAAALEHDKAYDQQLKAGDNPYLKYNHADAEFQERLKEDTSFGGNLGRAVFQAKKRLLEPLGLVEEAAKTAPGKKRPVEQSPQEPDSSAGIGKSGAQPAKKRLNFGQTGDSESVPDPQPLGEPPAAPSGVGPNTMAAGGGAPMADNNEGADGVGSSSGNWHCDSTWLGDRVITTSTRTWALPTYNNHLYKQISNGTSGGATNDNTYFGYSTPWGYFDFNRFHCHFSPRDWQRLINNNWGFRPKRLSFKLFNIQVKEVTQNEGTKTIANNLTSTIQVFTDSEYQLPYVLGSAHQGCLPPFPADVFMIPQYGYLTLNNGSQAVGRSSFYCLEYFPSQMLRTGNNFQFTYTFEDVPFHSSYAHSQSLDRLMNPLIDQYLYYLSRTQTTGGTANTQTLGFSQGGPNTMANQAKNWLPGPCYRQQRVSTNFREMPIGNFAWTAGTKYHLNGRNSLANPGIAMATHKDDEERFFPSNGILIFGKQNAARDNADYSDVMLTSEEEIKTTNPVATEEYGIVADNVMEPTRAPQIGTVNSQGALPGMVWQNRDVYLQGPIWAKIPHTDGNFHPSPLMGGFGLKHPPPQILIKNTPVPADPPTTFNQSKLNSFITQYSTGQVSVEIEWELQKENSKRWNPEIQYTSNYYKSTSVDFAVNTEGVYSEPRPIGTRYLTRNL

SEQ ID NO: 320 - protein, 738 aa, Artificial Sequence
  AAV capsid variant
MAADGYLPDWLEDNLSEGIREWWALKPGAPQPKANQQHQDNARGLVLPGYKYLGPGNGLDKGEPVNAADAAALEHDKAYDQQLKAGDNPYLKYNHADAEFQERLKEDTSFGGNLGRAVFQAKKRLLEPLGLVEEAAKTAPGKKRPVEQSPQEPDSSAGIGKSGAQPAKKRLNFGQTGDSESVPDPQPLGEPPAAPSGVGPNTMAAGGGAPMADNNEGADGVGSSSGNWHCDSTWLGDRVITTSTRTWALPTYNNHLYKQISNGTSGGATNDNTYFGYSTPWGYFDFNRFHCHFSPRDWQRLINNNWGFRPKRLSFKLFNIQVKEVTQNEGTKTIANNLTSTIQVFTDSEYQLPYVLGSAHQGCLPPFPADVFMIPQYGYLTLNNGSQAVGRSSFYCLEYFPSQMLRTGNNFQFTYTFEDVPFHSSYAHSQSLDRLMNPLIDQYLYYLSRTQTTGGTANTQTLGFSQGGPNTMANQAKNWLPGPCYRQQRVSTRRSEDMGTINFAWTAGTKYHLNGRNSLANPGIAMATHKDDEERFFPSNGILIFGKQNAARDNADYSDVMLTSEEEIKTTNPVATEEYGIVADNVMEPTRAPQIGTVNSQGALPGMVWQNRDVYLQGPIWAKIPHTDGNFHPSPLMGGFGLKHPPPQILIKNTPVPADPPTTFNQSKLNSFITQYSTGQVSVEIEWELQKENSKRWNPEIQYTSNYYKSTSVDFAVNTEGVYSEPRPIGTRYLTRNL

SEQ ID NO: 321 - protein, 736 aa, Artificial Sequence
  AAV capsid variant
MAADGYLPDWLEDNLSEGIREWWALKPGAPQPKANQQHQDNARGLVLPGYKYLGPGNGLDKGEPVNAADAAALEHDKAYDQQLKAGDNPYLKYNHADAEFQERLKEDTSFGGNLGRAVFQAKKRLLEPLGLVEEAAKTAPGKKRPVEQSPQEPDSSAGIGKSGAQPAKKRLNFGQTGDSESVPDPQPLGEPPAAPSGVGPNTMAAGGGAPMADNNEGADGVGSSSGNWHCDSTWLGDRVITTSTRTWALPTYNNHLYKQISNGTSGGATNDNTYFGYSTPWGYFDFNRFHCHFSPRDWQRLINNNWGFRPKRLSFKLFNIQVKEVTQNEGTKTIANNLTSTIQVFTDSEYQLPYVLGSAHQGCLPPFPADVFMIPQYGYLTLNNGSQAVGRSSFYCLEYFPSQMLRTGNNFQFTYTFEDVPFHSSYAHSQSLDRLMNPLIDQYLYYLSRTQTTSNGRGVTLGFSQGGPNTMANQAKNWLPGPCYRQQRVSTVVGNGGVVNFAWTAGTKYHLNGRNSLANPGIAMATHKDDEERFFPSNGILIFGKQNAARDNADYSDVMLTSEEEIKTTNPVATEEYGIVADNVMEPTRAPQIGTVNSQGALPGMVWQNRDVYLQGPIWAKIPHTDGNFHPSPLMGGFGLKHPPPQILIKNTPVPADPPTTFNQSKLNSFITQYSTGQVSVEIEWELQKENSKRWNPEIQYTSNYYKSTSVDFAVNTEGVYSEPRPIGTRYLTRNL

SEQ ID NO: 322 - protein, 736 aa, Artificial Sequence
  AAV capsid variant
MAADGYLPDWLEDNLSEGIREWWALKPGAPQPKANQQHQDNARGLVLPGYKYLGPGNGLDKGEPVNAADAAALEHDKAYDQQLKAGDNPYLKYNHADAEFQERLKEDTSFGGNLGRAVFQAKKRLLEPLGLVEEAAKTAPGKKRPVEQSPQEPDSSAGIGKSGAQPAKKRLNFGQTGDSESVPDPQPLGEPPAAPSGVGPNTMAAGGGAPMADNNEGADGVGSSSGNWHCDSTWLGDRVITTSTRTWALPTYNNHLYKQISNGTSGGATNDNTYFGYSTPWGYFDFNRFHCHFSPRDWQRLINNNWGFRPKRLSFKLFNIQVKEVTQNEGTKTIANNLTSTIQVFTDSEYQLPYVLGSAHQGCLPPFPADVFMIPQYGYLTLNNGSQAVGRSSFYCLEYFPSQMLRTGNNFQFTYTFEDVPFHSSYAHSQSLDRLMNPLIDQYLYYLSRTQTTSNGRGVTLGFSQGGPNTMANQAKNWLPGPCYRQQRVSTNFREMPIGNFAWTAGTKYHLNGRNSLANPGIAMATHKDDEERFFPSNGILIFGKQNAARDNADYSDVMLTSEEEIKTTNPVATEEYGIVADNVMEPTRAPQIGTVNSQGALPGMVWQNRDVYLQGPIWAKIPHTDGNFHPSPLMGGFGLKHPPPQILIKNTPVPADPPTTFNQSKLNSFITQYSTGQVSVEIEWELQKENSKRWNPEIQYTSNYYKSTSVDFAVNTEGVYSEPRPIGTRYLTRNL

SEQ ID NO: 323 - protein, 737 aa, Artificial Sequence
  AAV capsid variant
MAADGYLPDWLEDNLSEGIREWWALKPGAPQPKANQQHQDNARGLVLPGYKYLGPGNGLDKGEPVNAADAAALEHDKAYDQQLKAGDNPYLKYNHADAEFQERLKEDTSFGGNLGRAVFQAKKRLLEPLGLVEEAAKTAPGKKRPVEQSPQEPDSSAGIGKSGAQPAKKRLNFGQTGDSESVPDPQPLGEPPAAPSGVGPNTMAAGGGAPMADNNEGADGVGSSSGNWHCDSTWLGDRVITTSTRTWALPTYNNHLYKQISNGTSGGATNDNTYFGYSTPWGYFDFNRFHCHFSPRDWQRLINNNWGFRPKRLSFKLFNIQVKEVTQNEGTKTIANNLTSTIQVFTDSEYQLPYVLGSAHQGCLPPFPADVFMIPQYGYLTLNNGSQAVGRSSFYCLEYFPSQMLRTGNNFQFTYTFEDVPFHSSYAHSQSLDRLMNPLIDQYLYYLSRTQTTSNGRGVTLGFSQGGPNTMANQAKNWLPGPCYRQQRVSTRRSEDMGTINFAWTAGTKYHLNGRNSLANPGIAMATHKDDEERFFPSNGILIFGKQNAARDNADYSDVMLTSEEEIKTTNPVATEEYGIVADNVMEPTRAPQIGTVNSQGALPGMVWQNRDVYLQGPIWAKIPHTDGNFHPSPLMGGFGLKHPPPQILIKNTPVPADPPTTFNQSKLNSFITQYSTGQVSVEIEWELQKENSKRWNPEIQYTSNYYKSTSVDFAVNTEGVYSEPRPIGTRYLTRNL

SEQ ID NO: 324 - protein, 737 aa, Artificial Sequence
  AAV capsid variant
MAADGYLPDWLEDNLSEGIREWWALKPGAPKPKANQQKQDDGRGLVLPGYKYLGPFNGLDKGEPVNAADAAALEHDKAYDQQLQAGDNPYLRYNHADAEFQERLQEDTSFGGNLGRAVFQAKKRVLEPLGLVEEGAKTAPGKKRPVEPSPQRSPDSSTGIGKKGQQPARKRLNFGQTGDSESVPDPQPLGEPPAAPSGVGPNTMAAGGGAPMADNNEGADGVGSSSGNWHCDSTWLGDRVITTSTRTWALPTYNNHLYKQISNGTSGGATNDNTYFGYSTPWGYFDFNRFHCHFSPRDWQRLINNNWGFRPKRLSFKLFNIQVKEVTQNEGTKTIANNLTSTIQVFTDSEYQLPYVLGSAHQGCLPPFPADVFMIPQYGYLTLNNGSQAVGRSSFYCLEYFPSQMLRTGNNFQFTYTFEDVPFHSSYAHSQSLDRLMNPLIDQYLYYLSRTQTTSNGRGVTLGFSQGGPNTMANQAKNWLPGPCYRQQRVSTTTGQNNNSNFAWTAGTKYHLNGRNSLANPGIAMATHKDDEERFFPSNGILIFGKQNAARDNADYSDVMLTSEEEIKTTNPVATEEYGIVADNLQQQNTAPQIGTVNSQGALPGMVWQNRDVYLQGPIWAKIPHTDGNFHPSPLMGGFGLKHPPPQILIKNTPVPADPRSTFNGDKLNSFITQYSTGQVSVEIEWELQKENSKRWNPEIQYTSNYYKSTSVDFAVNTEGVYSEPRPIGTRYLTRNL

SEQ ID NO: 325 - protein, 738 aa, Artificial Sequence
  AAV capsid variant
MAADGYLPDWLEDNLSEGIREWWALKPGAPKPKANQQKQDDGRGLVLPGYKYLGPFNGLDKGEPVNAADAAALEHDKAYDQQLQAGDNPYLRYNHADAEFQERLQEDTSFGGNLGRAVFQAKKRVLEPLGLVEEGAKTAPGKKRPVEPSPQRSPDSSTGIGKKGQQPARKRLNFGQTGDSESVPDPQPLGEPPAAPSGVGPNTMAAGGGAPMADNNEGADGVGSSSGNWHCDSTWLGDRVITTSTRTWALPTYNNHLYKQISNGTSGGATNDNTYFGYSTPWGYFDFNRFHCHFSPRDWQRLINNNWGFRPKRLSFKLFNIQVKEVTQNEGTKTIANNLTSTIQVFTDSEYQLPYVLGSAHQGCLPPFPADVFMIPQYGYLTLNNGSQAVGRSSFYCLEYFPSQMLRTGNNFQFTYTFEDVPFHSSYAHSQSLDRLMNPLIDQYLYYLSRTQTTGGTANTQTLGFSQGGPNTMANQAKNWLPGPCYRQQRVSTNLAENFKYNFAWTAGTKYHLNGRNSLANPGIAMATHKDDEERFFPSNGILIFGKQNAARDNADYSDVMLTSEEEIKTTNPVATEEYGIVADNLQQQNTAPQIGTVNSQGALPGMVWQNRDVYLQGPIWAKIPHTDGNFHPSPLMGGFGLKHPPPQILIKNTPVPADPRSTFNGDKLNSFITQYSTGQVSVEIEWELQKENSKRWNPEIQYTSNYYKSTSVDFAVNTEGVYSEPRPIGTRYLTRNL

SEQ ID NO: 326 - protein, 738 aa, Artificial Sequence
  AAV capsid variant
MAADGYLPDWLEDNLSEGIREWWALKPGAPKPKANQQKQDDGRGLVLPGYKYLGPFNGLDKGEPVNAADAAALEHDKAYDQQLQAGDNPYLRYNHADAEFQERLQEDTSFGGNLGRAVFQAKKRVLEPLGLVEEGAKTAPGKKRPVEPSPQRSPDSSTGIGKKGQQPARKRLNFGQTGDSESVPDPQPLGEPPAAPSGVGPNTMAAGGGAPMADNNEGADGVGSSSGNWHCDSTWLGDRVITTSTRTWALPTYNNHLYKQISNGTSGGATNDNTYFGYSTPWGYFDFNRFHCHFSPRDWQRLINNNWGFRPKRLSFKLFNIQVKEVTQNEGTKTIANNLTSTIQVFTDSEYQLPYVLGSAHQGCLPPFPADVFMIPQYGYLTLNNGSQAVGRSSFYCLEYFPSQMLRTGNNFQFTYTFEDVPFHSSYAHSQSLDRLMNPLIDQYLYYLSRTQTTGGTANTQTLGFSQGGPNTMANQAKNWLPGPCYRQQRVSTVLSGDHSANFAWTAGTKYHLNGRNSLANPGIAMATHKDDEERFFPSNGILIFGKQNAARDNADYSDVMLTSEEEIKTTNPVATEEYGIVADNLQQQNTAPQIGTVNSQGALPGMVWQNRDVYLQGPIWAKIPHTDGNFHPSPLMGGFGLKHPPPQILIKNTPVPADPRSTFNGDKLNSFITQYSTGQVSVEIEWELQKENSKRWNPEIQYTSNYYKSTSVDFAVNTEGVYSEPRPIGTRYLTRNL

SEQ ID NO: 327 - protein, 738 aa, Artificial Sequence
  AAV capsid variant
MAADGYLPDWLEDNLSEGIREWWALKPGAPKPKANQQKQDDGRGLVLPGYKYLGPFNGLDKGEPVNAADAAALEHDKAYDQQLQAGDNPYLRYNHADAEFQERLQEDTSFGGNLGRAVFQAKKRVLEPLGLVEEGAKTAPGKKRPVEPSPQRSPDSSTGIGKKGQQPARKRLNFGQTGDSESVPDPQPLGEPPAAPSGVGPNTMAAGGGAPMADNNEGADGVGSSSGNWHCDSTWLGDRVITTSTRTWALPTYNNHLYKQISNGTSGGATNDNTYFGYSTPWGYFDFNRFHCHFSPRDWQRLINNNWGFRPKRLSFKLFNIQVKEVTQNEGTKTIANNLTSTIQVFTDSEYQLPYVLGSAHQGCLPPFPADVFMIPQYGYLTLNNGSQAVGRSSFYCLEYFPSQMLRTGNNFQFTYTFEDVPFHSSYAHSQSLDRLMNPLIDQYLYYLSRTQTTGGTANTQTLGFSQGGPNTMANQAKNWLPGPCYRQQRVSTMSAASGSGNFAWTAGTKYHLNGRNSLANPGIAMATHKDDEERFFPSNGILIFGKQNAARDNADYSDVMLTSEEEIKTTNPVATEEYGIVADNLQQQNTAPQIGTVNSQGALPGMVWQNRDVYLQGPIWAKIPHTDGNFHPSPLMGGFGLKHPPPQILIKNTPVPADPRSTFNGDKLNSFITQYSTGQVSVEIEWELQKENSKRWNPEIQYTSNYYKSTSVDFAVNTEGVYSEPRPIGTRYLTRNL

SEQ ID NO: 328 - protein, 738 aa, Artificial Sequence
  AAV capsid variant
MAADGYLPDWLEDNLSEGIREWWALKPGAPKPKANQQKQDDGRGLVLPGYKYLGPFNGLDKGEPVNAADAAALEHDKAYDQQLQAGDNPYLRYNHADAEFQERLQEDTSFGGNLGRAVFQAKKRVLEPLGLVEEGAKTAPGKKRPVEPSPQRSPDSSTGIGKKGQQPARKRLNFGQTGDSESVPDPQPLGEPPAAPSGVGPNTMAAGGGAPMADNNEGADGVGSSSGNWHCDSTWLGDRVITTSTRTWALPTYNNHLYKQISNGTSGGATNDNTYFGYSTPWGYFDFNRFHCHFSPRDWQRLINNNWGFRPKRLSFKLFNIQVKEVTQNEGTKTIANNLTSTIQVFTDSEYQLPYVLGSAHQGCLPPFPADVFMIPQYGYLTLNNGSQAVGRSSFYCLEYFPSQMLRTGNNFQFTYTFEDVPFHSSYAHSQSLDRLMNPLIDQYLYYLSRTQTTGGTANTQTLGFSQGGPNTMANQAKNWLPGPCYRQQRVSTGTNLGKEQNFAWTAGTKYHLNGRNSLANPGIAMATHKDDEERFFPSNGILIFGKQNAARDNADYSDVMLTSEEEIKTTNPVATEEYGIVADNLQQQNTAPQIGTVNSQGALPGMVWQNRDVYLQGPIWAKIPHTDGNFHPSPLMGGFGLKHPPPQILIKNTPVPADPRSTFNGDKLNSFITQYSTGQVSVEIEWELQKENSKRWNPEIQYTSNYYKSTSVDFAVNTEGVYSEPRPIGTRYLTRNL

SEQ ID NO: 329 - protein, 738 aa, Artificial Sequence
  AAV capsid variant
MAADGYLPDWLEDNLSEGIREWWALKPGAPKPKANQQKQDDGRGLVLPGYKYLGPFNGLDKGEPVNAADAAALEHDKAYDQQLQAGDNPYLRYNHADAEFQERLQEDTSFGGNLGRAVFQAKKRVLEPLGLVEEGAKTAPGKKRPVEPSPQRSPDSSTGIGKKGQQPARKRLNFGQTGDSESVPDPQPLGEPPAAPSGVGPNTMAAGGGAPMADNNEGADGVGSSSGNWHCDSTWLGDRVITTSTRTWALPTYNNHLYKQISNGTSGGATNDNTYFGYSTPWGYFDFNRFHCHFSPRDWQRLINNNWGFRPKRLSFKLFNIQVKEVTQNEGTKTIANNLTSTIQVFTDSEYQLPYVLGSAHQGCLPPFPADVFMIPQYGYLTLNNGSQAVGRSSFYCLEYFPSQMLRTGNNFQFTYTFEDVPFHSSYAHSQSLDRLMNPLIDQYLYYLSRTQTTGGTANTQTLGFSQGGPNTMANQAKNWLPGPCYRQQRVSTSSHSGTNQNFAWTAGTKYHLNGRNSLANPGIAMATHKDDEERFFPSNGILIFGKQNAARDNADYSDVMLTSEEEIKTTNPVATEEYGIVADNLQQQNTAPQIGTVNSQGALPGMVWQNRDVYLQGPIWAKIPHTDGNFHPSPLMGGFGLKHPPPQILIKNTPVPADPRSTFNGDKLNSFITQYSTGQVSVEIEWELQKENSKRWNPEIQYTSNYYKSTSVDFAVNTEGVYSEPRPIGTRYLTRNL

SEQ ID NO: 330 - protein, 738 aa, Artificial Sequence
  AAV capsid variant
MAADGYLPDWLEDNLSEGIREWWALKPGAPKPKANQQKQDDGRGLVLPGYKYLGPFNGLDKGEPVNAADAAALEHDKAYDQQLQAGDNPYLRYNHADAEFQERLQEDTSFGGNLGRAVFQAKKRVLEPLGLVEEGAKTAPGKKRPVEPSPQRSPDSSTGIGKKGQQPARKRLNFGQTGDSESVPDPQPLGEPPAAPSGVGPNTMAAGGGAPMADNNEGADGVGSSSGNWHCDSTWLGDRVITTSTRTWALPTYNNHLYKQISNGTSGGATNDNTYFGYSTPWGYFDFNRFHCHFSPRDWQRLINNNWGFRPKRLSFKLFNIQVKEVTQNEGTKTIANNLTSTIQVFTDSEYQLPYVLGSAHQGCLPPFPADVFMIPQYGYLTLNNGSQAVGRSSFYCLEYFPSQMLRTGNNFQFTYTFEDVPFHSSYAHSQSLDRLMNPLIDQYLYYLSRTQTTGGTANTQTLGFSQGGPNTMANQAKNWLPGPCYRQQRVSTVATRDGQLNFAWTAGTKYHLNGRNSLANPGIAMATHKDDEERFFPSNGILIFGKQNAARDNADYSDVMLTSEEEIKTTNPVATEEYGIVADNLQQQNTAPQIGTVNSQGALPGMVWQNRDVYLQGPIWAKIPHTDGNFHPSPLMGGFGLKHPPPQILIKNTPVPADPRSTFNGDKLNSFITQYSTGQVSVEIEWELQKENSKRWNPEIQYTSNYYKSTSVDFAVNTEGVYSEPRPIGTRYLTRNL

SEQ ID NO: 331 - protein, 738 aa, Artificial Sequence
  AAV capsid variant
MAADGYLPDWLEDNLSEGIREWWALKPGAPKPKANQQKQDDGRGLVLPGYKYLGPFNGLDKGEPVNAADAAALEHDKAYDQQLQAGDNPYLRYNHADAEFQERLQEDTSFGGNLGRAVFQAKKRVLEPLGLVEEGAKTAPGKKRPVEPSPQRSPDSSTGIGKKGQQPARKRLNFGQTGDSESVPDPQPLGEPPAAPSGVGPNTMAAGGGAPMADNNEGADGVGSSSGNWHCDSTWLGDRVITTSTRTWALPTYNNHLYKQISNGTSGGATNDNTYFGYSTPWGYFDFNRFHCHFSPRDWQRLINNNWGFRPKRLSFKLFNIQVKEVTQNEGTKTIANNLTSTIQVFTDSEYQLPYVLGSAHQGCLPPFPADVFMIPQYGYLTLNNGSQAVGRSSFYCLEYFPSQMLRTGNNFQFTYTFEDVPFHSSYAHSQSLDRLMNPLIDQYLYYLSRTQTTGGTANTQTLGFSQGGPNTMANQAKNWLPGPCYRQQRVSTALNADTGTNFAWTAGTKYHLNGRNSLANPGIAMATHKDDEERFFPSNGILIFGKQNAARDNADYSDVMLTSEEEIKTTNPVATEEYGIVADNLQQQNTAPQIGTVNSQGALPGMVWQNRDVYLQGPIWAKIPHTDGNFHPSPLMGGFGLKHPPPQILIKNTPVPADPRSTFNGDKLNSFITQYSTGQVSVEIEWELQKENSKRWNPEIQYTSNYYKSTSVDFAVNTEGVYSEPRPIGTRYLTRNL

SEQ ID NO: 332 - protein, 738 aa, Artificial Sequence
  AAV capsid variant
MAADGYLPDWLEDNLSEGIREWWALKPGAPKPKANQQKQDDGRGLVLPGYKYLGPFNGLDKGEPVNAADAAALEHDKAYDQQLQAGDNPYLRYNHADAEFQERLQEDTSFGGNLGRAVFQAKKRVLEPLGLVEEGAKTAPGKKRPVEPSPQRSPDSSTGIGKKGQQPARKRLNFGQTGDSESVPDPQPLGEPPAAPSGVGPNTMAAGGGAPMADNNEGADGVGSSSGNWHCDSTWLGDRVITTSTRTWALPTYNNHLYKQISNGTSGGATNDNTYFGYSTPWGYFDFNRFHCHFSPRDWQRLINNNWGFRPKRLSFKLFNIQVKEVTQNEGTKTIANNLTSTIQVFTDSEYQLPYVLGSAHQGCLPPFPADVFMIPQYGYLTLNNGSQAVGRSSFYCLEYFPSQMLRTGNNFQFTYTFEDVPFHSSYAHSQSLDRLMNPLIDQYLYYLSRTQTTGGTANTQTLGFSQGGPNTMANQAKNWLPGPCYRQQRVSTTTGQNNNSNFAWTAGTKYHLNGRNSLANPGIAMATHKDDEERFFPSNGILIFGKQNAARDNADYSDVMLTSEEEIKTTNPVATEEYGIVADNVMEPTRAPQIGTVNSQGALPGMVWQNRDVYLQGPIWAKIPHTDGNFHPSPLMGGFGLKHPPPQILIKNTPVPADPRSTFNGDKLNSFITQYSTGQVSVEIEWELQKENSKRWNPEIQYTSNYYKSTSVDFAVNTEGVYSEPRPIGTRYLTRNL

SEQ ID NO: 333 - protein, 737 aa, Artificial Sequence
  AAV capsid variant
MAADGYLPDWLEDNLSEGIREWWALKPGAPKPKANQQKQDDGRGLVLPGYKYLGPFNGLDKGEPVNAADAAALEHDKAYDQQLQAGDNPYLRYNHADAEFQERLQEDTSFGGNLGRAVFQAKKRVLEPLGLVEEGAKTAPGKKRPVEPSPQRSPDSSTGIGKKGQQPARKRLNFGQTGDSESVPDPQPLGEPPAAPSGVGPNTMAAGGGAPMADNNEGADGVGSSSGNWHCDSTWLGDRVITTSTRTWALPTYNNHLYKQISNGTSGGATNDNTYFGYSTPWGYFDFNRFHCHFSPRDWQRLINNNWGFRPKRLSFKLFNIQVKEVTQNEGTKTIANNLTSTIQVFTDSEYQLPYVLGSAHQGCLPPFPADVFMIPQYGYLTLNNGSQAVGRSSFYCLEYFPSQMLRTGNNFQFTYTFEDVPFHSSYAHSQSLDRLMNPLIDQYLYYLSRTQTTSNGRGVTLGFSQGGPNTMANQAKNWLPGPCYRQQRVSTTTGQNNNSNFAWTAGTKYHLNGRNSLANPGIAMATHKDDEERFFPSNGILIFGKQNAARDNADYSDVMLTSEEEIKTTNPVATEEYGIVADNVMEPTRAPQIGTVNSQGALPGMVWQNRDVYLQGPIWAKIPHTDGNFHPSPLMGGFGLKHPPPQILIKNTPVPADPRSTFNGDKLNSFITQYSTGQVSVEIEWELQKENSKRWNPEIQYTSNYYKSTSVDFAVNTEGVYSEPRPIGTRYLTRNL

SEQ ID NO: 334 - protein, 737 aa, Artificial Sequence
  AAV capsid variant
MAADGYLPDWLEDNLSEGIREWWALKPGAPKPKANQQKQDDGRGLVLPGYKYLGPFNGLDKGEPVNAADAAALEHDKAYDQQLQAGDNPYLRYNHADAEFQERLQEDTSFGGNLGRAVFQAKKRVLEPLGLVEEGAKTAPGKKRPVEPSPQRSPDSSTGIGKKGQQPARKRLNFGQTGDSESVPDPQPLGEPPAAPSGVGPNTMAAGGGAPMADNNEGADGVGSSSGNWHCDSTWLGDRVITTSTRTWALPTYNNHLYKQISNGTSGGATNDNTYFGYSTPWGYFDFNRFHCHFSPRDWQRLINNNWGFRPKRLSFKLFNIQVKEVTQNEGTKTIANNLTSTIQVFTDSEYQLPYVLGSAHQGCLPPFPADVFMIPQYGYLTLNNGSQAVGRSSFYCLEYFPSQMLRTGNNFQFTYTFEDVPFHSSYAHSQSLDRLMNPLIDQYLYYLSRTQTTSNGRGVTLGFSQGGPNTMANQAKNWLPGPCYRQQRVSTNLAENFKYNFAWTAGTKYHLNGRNSLANPGIAMATHKDDEERFFPSNGILIFGKQNAARDNADYSDVMLTSEEEIKTTNPVATEEYGIVADNLQQQNTAPQIGTVNSQGALPGMVWQNRDVYLQGPIWAKIPHTDGNFHPSPLMGGFGLKHPPPQILIKNTPVPADPRSTFNGDKLNSFITQYSTGQVSVEIEWELQKENSKRWNPEIQYTSNYYKSTSVDFAVNTEGVYSEPRPIGTRYLTRNL

SEQ ID NO: 335 - protein, 737 aa, Artificial Sequence
  AAV capsid variant
MAADGYLPDWLEDNLSEGIREWWALKPGAPKPKANQQKQDDGRGLVLPGYKYLGPFNGLDKGEPVNAADAAALEHDKAYDQQLQAGDNPYLRYNHADAEFQERLQEDTSFGGNLGRAVFQAKKRVLEPLGLVEEGAKTAPGKKRPVEPSPQRSPDSSTGIGKKGQQPARKRLNFGQTGDSESVPDPQPLGEPPAAPSGVGPNTMAAGGGAPMADNNEGADGVGSSSGNWHCDSTWLGDRVITTSTRTWALPTYNNHLYKQISNGTSGGATNDNTYFGYSTPWGYFDFNRFHCHFSPRDWQRLINNNWGFRPKRLSFKLFNIQVKEVTQNEGTKTIANNLTSTIQVFTDSEYQLPYVLGSAHQGCLPPFPADVFMIPQYGYLTLNNGSQAVGRSSFYCLEYFPSQMLRTGNNFQFTYTFEDVPFHSSYAHSQSLDRLMNPLIDQYLYYLSRTQTTSNGRGVTLGFSQGGPNTMANQAKNWLPGPCYRQQRVSTVLSGDHSANFAWTAGTKYHLNGRNSLANPGIAMATHKDDEERFFPSNGILIFGKQNAARDNADYSDVMLTSEEEIKTTNPVATEEYGIVADNLQQQNTAPQIGTVNSQGALPGMVWQNRDVYLQGPIWAKIPHTDGNFHPSPLMGGFGLKHPPPQILIKNTPVPADPRSTFNGDKLNSFITQYSTGQVSVEIEWELQKENSKRWNPEIQYTSNYYKSTSVDFAVNTEGVYSEPRPIGTRYLTRNL

SEQ ID NO: 336 - protein, 737 aa, Artificial Sequence
  AAV capsid variant
MAADGYLPDWLEDNLSEGIREWWALKPGAPKPKANQQKQDDGRGLVLPGYKYLGPFNGLDKGEPVNAADAAALEHDKAYDQQLQAGDNPYLRYNHADAEFQERLQEDTSFGGNLGRAVFQAKKRVLEPLGLVEEGAKTAPGKKRPVEPSPQRSPDSSTGIGKKGQQPARKRLNFGQTGDSESVPDPQPLGEPPAAPSGVGPNTMAAGGGAPMADNNEGADGVGSSSGNWHCDSTWLGDRVITTSTRTWALPTYNNHLYKQISNGTSGGATNDNTYFGYSTPWGYFDFNRFHCHFSPRDWQRLINNNWGFRPKRLSFKLFNIQVKEVTQNEGTKTIANNLTSTIQVFTDSEYQLPYVLGSAHQGCLPPFPADVFMIPQYGYLTLNNGSQAVGRSSFYCLEYFPSQMLRTGNNFQFTYTFEDVPFHSSYAHSQSLDRLMNPLIDQYLYYLSRTQTTSNGRGVTLGFSQGGPNTMANQAKNWLPGPCYRQQRVSTMSAASGSGNFAWTAGTKYHLNGRNSLANPGIAMATHKDDEERFFPSNGILIFGKQNAARDNADYSDVMLTSEEEIKTTNPVATEEYGIVADNLQQQNTAPQIGTVNSQGALPGMVWQNRDVYLQGPIWAKIPHTDGNFHPSPLMGGFGLKHPPPQILIKNTPVPADPRSTFNGDKLNSFITQYSTGQVSVEIEWELQKENSKRWNPEIQYTSNYYKSTSVDFAVNTEGVYSEPRPIGTRYLTRNL

SEQ ID NO: 337 - protein, 737 aa, Artificial Sequence
  AAV capsid variant
MAADGYLPDWLEDNLSEGIREWWALKPGAPKPKANQQKQDDGRGLVLPGYKYLGPFNGLDKGEPVNAADAAALEHDKAYDQQLQAGDNPYLRYNHADAEFQERLQEDTSFGGNLGRAVFQAKKRVLEPLGLVEEGAKTAPGKKRPVEPSPQRSPDSSTGIGKKGQQPARKRLNFGQTGDSESVPDPQPLGEPPAAPSGVGPNTMAAGGGAPMADNNEGADGVGSSSGNWHCDSTWLGDRVITTSTRTWALPTYNNHLYKQISNGTSGGATNDNTYFGYSTPWGYFDFNRFHCHFSPRDWQRLINNNWGFRPKRLSFKLFNIQVKEVTQNEGTKTIANNLTSTIQVFTDSEYQLPYVLGSAHQGCLPPFPADVFMIPQYGYLTLNNGSQAVGRSSFYCLEYFPSQMLRTGNNFQFTYTFEDVPFHSSYAHSQSLDRLMNPLIDQYLYYLSRTQTTSNGRGVTLGFSQGGPNTMANQAKNWLPGPCYRQQRVSTGTNLGKEQNFAWTAGTKYHLNGRNSLANPGIAMATHKDDEERFFPSNGILIFGKQNAARDNADYSDVMLTSEEEIKTTNPVATEEYGIVADNLQQQNTAPQIGTVNSQGALPGMVWQNRDVYLQGPIWAKIPHTDGNFHPSPLMGGFGLKHPPPQILIKNTPVPADPRSTFNGDKLNSFITQYSTGQVSVEIEWELQKENSKRWNPEIQYTSNYYKSTSVDFAVNTEGVYSEPRPIGTRYLTRNL

SEQ ID NO: 338 - protein, 737 aa, Artificial Sequence
  AAV capsid variant
MAADGYLPDWLEDNLSEGIREWWALKPGAPKPKANQQKQDDGRGLVLPGYKYLGPFNGLDKGEPVNAADAAALEHDKAYDQQLQAGDNPYLRYNHADAEFQERLQEDTSFGGNLGRAVFQAKKRVLEPLGLVEEGAKTAPGKKRPVEPSPQRSPDSSTGIGKKGQQPARKRLNFGQTGDSESVPDPQPLGEPPAAPSGVGPNTMAAGGGAPMADNNEGADGVGSSSGNWHCDSTWLGDRVITTSTRTWALPTYNNHLYKQISNGTSGGATNDNTYFGYSTPWGYFDFNRFHCHFSPRDWQRLINNNWGFRPKRLSFKLFNIQVKEVTQNEGTKTIANNLTSTIQVFTDSEYQLPYVLGSAHQGCLPPFPADVFMIPQYGYLTLNNGSQAVGRSSFYCLEYFPSQMLRTGNNFQFTYTFEDVPFHSSYAHSQSLDRLMNPLIDQYLYYLSRTQTTSNGRGVTLGFSQGGPNTMANQAKNWLPGPCYRQQRVSTSSHSGTNQNFAWTAGTKYHLNGRNSLANPGIAMATHKDDEERFFPSNGILIFGKQNAARDNADYSDVMLTSEEEIKTTNPVATEEYGIVADNLQQQNTAPQIGTVNSQGALPGMVWQNRDVYLQGPIWAKIPHTDGNFHPSPLMGGFGLKHPPPQILIKNTPVPADPRSTFNGDKLNSFITQYSTGQVSVEIEWELQKENSKRWNPEIQYTSNYYKSTSVDFAVNTEGVYSEPRPIGTRYLTRNL

SEQ ID NO: 339 - protein, 737 aa, Artificial Sequence
  AAV capsid variant
MAADGYLPDWLEDNLSEGIREWWALKPGAPKPKANQQKQDDGRGLVLPGYKYLGPFNGLDKGEPVNAADAAALEHDKAYDQQLQAGDNPYLRYNHADAEFQERLQEDTSFGGNLGRAVFQAKKRVLEPLGLVEEGAKTAPGKKRPVEPSPQRSPDSSTGIGKKGQQPARKRLNFGQTGDSESVPDPQPLGEPPAAPSGVGPNTMAAGGGAPMADNNEGADGVGSSSGNWHCDSTWLGDRVITTSTRTWALPTYNNHLYKQISNGTSGGATNDNTYFGYSTPWGYFDFNRFHCHFSPRDWQRLINNNWGFRPKRLSFKLFNIQVKEVTQNEGTKTIANNLTSTIQVFTDSEYQLPYVLGSAHQGCLPPFPADVFMIPQYGYLTLNNGSQAVGRSSFYCLEYFPSQMLRTGNNFQFTYTFEDVPFHSSYAHSQSLDRLMNPLIDQYLYYLSRTQTTSNGRGVTLGFSQGGPNTMANQAKNWLPGPCYRQQRVSTVATRDGQLNFAWTAGTKYHLNGRNSLANPGIAMATHKDDEERFFPSNGILIFGKQNAARDNADYSDVMLTSEEEIKTTNPVATEEYGIVADNLQQQNTAPQIGTVNSQGALPGMVWQNRDVYLQGPIWAKIPHTDGNFHPSPLMGGFGLKHPPPQILIKNTPVPADPRSTFNGDKLNSFITQYSTGQVSVEIEWELQKENSKRWNPEIQYTSNYYKSTSVDFAVNTEGVYSEPRPIGTRYLTRNL

SEQ ID NO: 340 - protein, 737 aa, Artificial Sequence
  AAV capsid variant
MAADGYLPDWLEDNLSEGIREWWALKPGAPKPKANQQKQDDGRGLVLPGYKYLGPFNGLDKGEPVNAADAAALEHDKAYDQQLQAGDNPYLRYNHADAEFQERLQEDTSFGGNLGRAVFQAKKRVLEPLGLVEEGAKTAPGKKRPVEPSPQRSPDSSTGIGKKGQQPARKRLNFGQTGDSESVPDPQPLGEPPAAPSGVGPNTMAAGGGAPMADNNEGADGVGSSSGNWHCDSTWLGDRVITTSTRTWALPTYNNHLYKQISNGTSGGATNDNTYFGYSTPWGYFDFNRFHCHFSPRDWQRLINNNWGFRPKRLSFKLFNIQVKEVTQNEGTKTIANNLTSTIQVFTDSEYQLPYVLGSAHQGCLPPFPADVFMIPQYGYLTLNNGSQAVGRSSFYCLEYFPSQMLRTGNNFQFTYTFEDVPFHSSYAHSQSLDRLMNPLIDQYLYYLSRTQTTSNGRGVTLGFSQGGPNTMANQAKNWLPGPCYRQQRVSTALNADTGTNFAWTAGTKYHLNGRNSLANPGIAMATHKDDEERFFPSNGILIFGKQNAARDNADYSDVMLTSEEEIKTTNPVATEEYGIVADNLQQQNTAPQIGTVNSQGALPGMVWQNRDVYLQGPIWAKIPHTDGNFHPSPLMGGFGLKHPPPQILIKNTPVPADPRSTFNGDKLNSFITQYSTGQVSVEIEWELQKENSKRWNPEIQYTSNYYKSTSVDFAVNTEGVYSEPRPIGTRYLTRNL

SEQ ID NO: 341 - protein, 738 aa, Artificial Sequence
  AAV capsid variant
MAADGYLPDWLEDNLSEGIREWWALKPGAPKPKANQQKQDDGRGLVLPGYKYLGPFNGLDKGEPVNAADAAALEHDKAYDQQLQAGDNPYLRYNHADAEFQERLQEDTSFGGNLGRAVFQAKKRVLEPLGLVEEGAKTAPGKKRPVEPSPQRSPDSSTGIGKKGQQPARKRLNFGQTGDSESVPDPQPLGEPPAAPSGVGPNTMAAGGGAPMADNNEGADGVGSSSGNWHCDSTWLGDRVITTSTRTWALPTYNNHLYKQISNGTSGGATNDNTYFGYSTPWGYFDFNRFHCHFSPRDWQRLINNNWGFRPKRLSFKLFNIQVKEVTQNEGTKTIANNLTSTIQVFTDSEYQLPYVLGSAHQGCLPPFPADVFMIPQYGYLTLNNGSQAVGRSSFYCLEYFPSQMLRTGNNFQFTYTFEDVPFHSSYAHSQSLDRLMNPLIDQYLYYLSRTQTTGGTANTQTLGFSQGGPNTMANQAKNWLPGPCYRQQRVSTNLAENFKYNFAWTAGTKYHLNGRNSLANPGIAMATHKDDEERFFPSNGILIFGKQNAARDNADYSDVMLTSEEEIKTTNPVATEEYGIVADNVMEPTRAPQIGTVNSQGALPGMVWQNRDVYLQGPIWAKIPHTDGNFHPSPLMGGFGLKHPPPQILIKNTPVPADPRSTFNGDKLNSFITQYSTGQVSVEIEWELQKENSKRWNPEIQYTSNYYKSTSVDFAVNTEGVYSEPRPIGTRYLTRNL

SEQ ID NO: 342 - protein, 738 aa, Artificial Sequence
  AAV capsid variant
MAADGYLPDWLEDNLSEGIREWWALKPGAPKPKANQQKQDDGRGLVLPGYKYLGPFNGLDKGEPVNAADAAALEHDKAYDQQLQAGDNPYLRYNHADAEFQERLQEDTSFGGNLGRAVFQAKKRVLEPLGLVEEGAKTAPGKKRPVEPSPQRSPDSSTGIGKKGQQPARKRLNFGQTGDSESVPDPQPLGEPPAAPSGVGPNTMAAGGGAPMADNNEGADGVGSSSGNWHCDSTWLGDRVITTSTRTWALPTYNNHLYKQISNGTSGGATNDNTYFGYSTPWGYFDFNRFHCHFSPRDWQRLINNNWGFRPKRLSFKLFNIQVKEVTQNEGTKTIANNLTSTIQVFTDSEYQLPYVLGSAHQGCLPPFPADVFMIPQYGYLTLNNGSQAVGRSSFYCLEYFPSQMLRTGNNFQFTYTFEDVPFHSSYAHSQSLDRLMNPLIDQYLYYLSRTQTTGGTANTQTLGFSQGGPNTMANQAKNWLPGPCYRQQRVSTVLSGDHSANFAWTAGTKYHLNGRNSLANPGIAMATHKDDEERFFPSNGILIFGKQNAARDNADYSDVMLTSEEEIKTTNPVATEEYGIVADNVMEPTRAPQIGTVNSQGALPGMVWQNRDVYLQGPIWAKIPHTDGNFHPSPLMGGFGLKHPPPQILIKNTPVPADPRSTFNGDKLNSFITQYSTGQVSVEIEWELQKENSKRWNPEIQYTSNYYKSTSVDFAVNTEGVYSEPRPIGTRYLTRNL

SEQ ID NO: 343 - protein, 738 aa, Artificial Sequence
  AAV capsid variant
MAADGYLPDWLEDNLSEGIREWWALKPGAPKPKANQQKQDDGRGLVLPGYKYLGPFNGLDKGEPVNAADAAALEHDKAYDQQLQAGDNPYLRYNHADAEFQERLQEDTSFGGNLGRAVFQAKKRVLEPLGLVEEGAKTAPGKKRPVEPSPQRSPDSSTGIGKKGQQPARKRLNFGQTGDSESVPDPQPLGEPPAAPSGVGPNTMAAGGGAPMADNNEGADGVGSSSGNWHCDSTWLGDRVITTSTRTWALPTYNNHLYKQISNGTSGGATNDNTYFGYSTPWGYFDFNRFHCHFSPRDWQRLINNNWGFRPKRLSFKLFNIQVKEVTQNEGTKTIANNLTSTIQVFTDSEYQLPYVLGSAHQGCLPPFPADVFMIPQYGYLTLNNGSQAVGRSSFYCLEYFPSQMLRTGNNFQFTYTFEDVPFHSSYAHSQSLDRLMNPLIDQYLYYLSRTQTTGGTANTQTLGFSQGGPNTMANQAKNWLPGPCYRQQRVSTMSAASGSGNFAWTAGTKYHLNGRNSLANPGIAMATHKDDEERFFPSNGILIFGKQNAARDNADYSDVMLTSEEEIKTTNPVATEEYGIVADNVMEPTRAPQIGTVNSQGALPGMVWQNRDVYLQGPIWAKIPHTDGNFHPSPLMGGFGLKHPPPQILIKNTPVPADPRSTFNGDKLNSFITQYSTGQVSVEIEWELQKENSKRWNPEIQYTSNYYKSTSVDFAVNTEGVYSEPRPIGTRYLTRNL

SEQ ID NO: 344 - protein, 738 aa, Artificial Sequence
  AAV capsid variant
MAADGYLPDWLEDNLSEGIREWWALKPGAPKPKANQQKQDDGRGLVLPGYKYLGPFNGLDKGEPVNAADAAALEHDKAYDQQLQAGDNPYLRYNHADAEFQERLQEDTSFGGNLGRAVFQAKKRVLEPLGLVEEGAKTAPGKKRPVEPSPQRSPDSSTGIGKKGQQPARKRLNFGQTGDSESVPDPQPLGEPPAAPSGVGPNTMAAGGGAPMADNNEGADGVGSSSGNWHCDSTWLGDRVITTSTRTWALPTYNNHLYKQISNGTSGGATNDNTYFGYSTPWGYFDFNRFHCHFSPRDWQRLINNNWGFRPKRLSFKLFNIQVKEVTQNEGTKTIANNLTSTIQVFTDSEYQLPYVLGSAHQGCLPPFPADVFMIPQYGYLTLNNGSQAVGRSSFYCLEYFPSQMLRTGNNFQFTYTFEDVPFHSSYAHSQSLDRLMNPLIDQYLYYLSRTQTTGGTANTQTLGFSQGGPNTMANQAKNWLPGPCYRQQRVSTGTNLGKEQNFAWTAGTKYHLNGRNSLANPGIAMATHKDDEERFFPSNGILIFGKQNAARDNADYSDVMLTSEEEIKTTNPVATEEYGIVADNVMEPTRAPQIGTVNSQGALPGMVWQNRDVYLQGPIWAKIPHTDGNFHPSPLMGGFGLKHPPPQILIKNTPVPADPRSTFNGDKLNSFITQYSTGQVSVEIEWELQKENSKRWNPEIQYTSNYYKSTSVDFAVNTEGVYSEPRPIGTRYLTRNL

SEQ ID NO: 345 - protein, 738 aa, Artificial Sequence
  AAV capsid variant
MAADGYLPDWLEDNLSEGIREWWALKPGAPKPKANQQKQDDGRGLVLPGYKYLGPFNGLDKGEPVNAADAAALEHDKAYDQQLQAGDNPYLRYNHADAEFQERLQEDTSFGGNLGRAVFQAKKRVLEPLGLVEEGAKTAPGKKRPVEPSPQRSPDSSTGIGKKGQQPARKRLNFGQTGDSESVPDPQPLGEPPAAPSGVGPNTMAAGGGAPMADNNEGADGVGSSSGNWHCDSTWLGDRVITTSTRTWALPTYNNHLYKQISNGTSGGATNDNTYFGYSTPWGYFDFNRFHCHFSPRDWQRLINNNWGFRPKRLSFKLFNIQVKEVTQNEGTKTIANNLTSTIQVFTDSEYQLPYVLGSAHQGCLPPFPADVFMIPQYGYLTLNNGSQAVGRSSFYCLEYFPSQMLRTGNNFQFTYTFEDVPFHSSYAHSQSLDRLMNPLIDQYLYYLSRTQTTGGTANTQTLGFSQGGPNTMANQAKNWLPGPCYRQQRVSTSSHSGTNQNFAWTAGTKYHLNGRNSLANPGIAMATHKDDEERFFPSNGILIFGKQNAARDNADYSDVMLTSEEEIKTTNPVATEEYGIVADNVMEPTRAPQIGTVNSQGALPGMVWQNRDVYLQGPIWAKIPHTDGNFHPSPLMGGFGLKHPPPQILIKNTPVPADPRSTFNGDKLNSFITQYSTGQVSVEIEWELQKENSKRWNPEIQYTSNYYKSTSVDFAVNTEGVYSEPRPIGTRYLTRNL

SEQ ID NO: 346 - protein, 738 aa, Artificial Sequence
  AAV capsid variant
MAADGYLPDWLEDNLSEGIREWWALKPGAPKPKANQQKQDDGRGLVLPGYKYLGPFNGLDKGEPVNAADAAALEHDKAYDQQLQAGDNPYLRYNHADAEFQERLQEDTSFGGNLGRAVFQAKKRVLEPLGLVEEGAKTAPGKKRPVEPSPQRSPDSSTGIGKKGQQPARKRLNFGQTGDSESVPDPQPLGEPPAAPSGVGPNTMAAGGGAPMADNNEGADGVGSSSGNWHCDSTWLGDRVITTSTRTWALPTYNNHLYKQISNGTSGGATNDNTYFGYSTPWGYFDFNRFHCHFSPRDWQRLINNNWGFRPKRLSFKLFNIQVKEVTQNEGTKTIANNLTSTIQVFTDSEYQLPYVLGSAHQGCLPPFPADVFMIPQYGYLTLNNGSQAVGRSSFYCLEYFPSQMLRTGNNFQFTYTFEDVPFHSSYAHSQSLDRLMNPLIDQYLYYLSRTQTTGGTANTQTLGFSQGGPNTMANQAKNWLPGPCYRQQRVSTVATRDGQLNFAWTAGTKYHLNGRNSLANPGIAMATHKDDEERFFPSNGILIFGKQNAARDNADYSDVMLTSEEEIKTTNPVATEEYGIVADNVMEPTRAPQIGTVNSQGALPGMVWQNRDVYLQGPIWAKIPHTDGNFHPSPLMGGFGLKHPPPQILIKNTPVPADPRSTFNGDKLNSFITQYSTGQVSVEIEWELQKENSKRWNPEIQYTSNYYKSTSVDFAVNTEGVYSEPRPIGTRYLTRNL

SEQ ID NO: 347 - protein, 738 aa, Artificial Sequence
  AAV capsid variant
MAADGYLPDWLEDNLSEGIREWWALKPGAPKPKANQQKQDDGRGLVLPGYKYLGPFNGLDKGEPVNAADAAALEHDKAYDQQLQAGDNPYLRYNHADAEFQERLQEDTSFGGNLGRAVFQAKKRVLEPLGLVEEGAKTAPGKKRPVEPSPQRSPDSSTGIGKKGQQPARKRLNFGQTGDSESVPDPQPLGEPPAAPSGVGPNTMAAGGGAPMADNNEGADGVGSSSGNWHCDSTWLGDRVITTSTRTWALPTYNNHLYKQISNGTSGGATNDNTYFGYSTPWGYFDFNRFHCHFSPRDWQRLINNNWGFRPKRLSFKLFNIQVKEVTQNEGTKTIANNLTSTIQVFTDSEYQLPYVLGSAHQGCLPPFPADVFMIPQYGYLTLNNGSQAVGRSSFYCLEYFPSQMLRTGNNFQFTYTFEDVPFHSSYAHSQSLDRLMNPLIDQYLYYLSRTQTTGGTANTQTLGFSQGGPNTMANQAKNWLPGPCYRQQRVSTALNADTGTNFAWTAGTKYHLNGRNSLANPGIAMATHKDDEERFFPSNGILIFGKQNAARDNADYSDVMLTSEEEIKTTNPVATEEYGIVADNVMEPTRAPQIGTVNSQGALPGMVWQNRDVYLQGPIWAKIPHTDGNFHPSPLMGGFGLKHPPPQILIKNTPVPADPRSTFNGDKLNSFITQYSTGQVSVEIEWELQKENSKRWNPEIQYTSNYYKSTSVDFAVNTEGVYSEPRPIGTRYLTRNL

SEQ ID NO: 348 - protein, 737 aa, Artificial Sequence
  AAV capsid variant
MAADGYLPDWLEDNLSEGIREWWALKPGAPKPKANQQKQDDGRGLVLPGYKYLGPFNGLDKGEPVNAADAAALEHDKAYDQQLQAGDNPYLRYNHADAEFQERLQEDTSFGGNLGRAVFQAKKRVLEPLGLVEEGAKTAPGKKRPVEPSPQRSPDSSTGIGKKGQQPARKRLNFGQTGDSESVPDPQPLGEPPAAPSGVGPNTMAAGGGAPMADNNEGADGVGSSSGNWHCDSTWLGDRVITTSTRTWALPTYNNHLYKQISNGTSGGATNDNTYFGYSTPWGYFDFNRFHCHFSPRDWQRLINNNWGFRPKRLSFKLFNIQVKEVTQNEGTKTIANNLTSTIQVFTDSEYQLPYVLGSAHQGCLPPFPADVFMIPQYGYLTLNNGSQAVGRSSFYCLEYFPSQMLRTGNNFQFTYTFEDVPFHSSYAHSQSLDRLMNPLIDQYLYYLSRTQTTSNGRGVTLGFSQGGPNTMANQAKNWLPGPCYRQQRVSTNLAENFKYNFAWTAGTKYHLNGRNSLANPGIAMATHKDDEERFFPSNGILIFGKQNAARDNADYSDVMLTSEEEIKTTNPVATEEYGIVADNVMEPTRAPQIGTVNSQGALPGMVWQNRDVYLQGPIWAKIPHTDGNFHPSPLMGGFGLKHPPPQILIKNTPVPADPRSTFNGDKLNSFITQYSTGQVSVEIEWELQKENSKRWNPEIQYTSNYYKSTSVDFAVNTEGVYSEPRPIGTRYLTRNL

SEQ ID NO: 349 - protein, 737 aa, Artificial Sequence
  AAV capsid variant
MAADGYLPDWLEDNLSEGIREWWALKPGAPKPKANQQKQDDGRGLVLPGYKYLGPFNGLDKGEPVNAADAAALEHDKAYDQQLQAGDNPYLRYNHADAEFQERLQEDTSFGGNLGRAVFQAKKRVLEPLGLVEEGAKTAPGKKRPVEPSPQRSPDSSTGIGKKGQQPARKRLNFGQTGDSESVPDPQPLGEPPAAPSGVGPNTMAAGGGAPMADNNEGADGVGSSSGNWHCDSTWLGDRVITTSTRTWALPTYNNHLYKQISNGTSGGATNDNTYFGYSTPWGYFDFNRFHCHFSPRDWQRLINNNWGFRPKRLSFKLFNIQVKEVTQNEGTKTIANNLTSTIQVFTDSEYQLPYVLGSAHQGCLPPFPADVFMIPQYGYLTLNNGSQAVGRSSFYCLEYFPSQMLRTGNNFQFTYTFEDVPFHSSYAHSQSLDRLMNPLIDQYLYYLSRTQTTSNGRGVTLGFSQGGPNTMANQAKNWLPGPCYRQQRVSTVLSGDHSANFAWTAGTKYHLNGRNSLANPGIAMATHKDDEERFFPSNGILIFGKQNAARDNADYSDVMLTSEEEIKTTNPVATEEYGIVADNVMEPTRAPQIGTVNSQGALPGMVWQNRDVYLQGPIWAKIPHTDGNFHPSPLMGGFGLKHPPPQILIKNTPVPADPRSTFNGDKLNSFITQYSTGQVSVEIEWELQKENSKRWNPEIQYTSNYYKSTSVDFAVNTEGVYSEPRPIGTRYLTRNL

SEQ ID NO: 350 - protein, 737 aa, Artificial Sequence
  AAV capsid variant
MAADGYLPDWLEDNLSEGIREWWALKPGAPKPKANQQKQDDGRGLVLPGYKYLGPFNGLDKGEPVNAADAAALEHDKAYDQQLQAGDNPYLRYNHADAEFQERLQEDTSFGGNLGRAVFQAKKRVLEPLGLVEEGAKTAPGKKRPVEPSPQRSPDSSTGIGKKGQQPARKRLNFGQTGDSESVPDPQPLGEPPAAPSGVGPNTMAAGGGAPMADNNEGADGVGSSSGNWHCDSTWLGDRVITTSTRTWALPTYNNHLYKQISNGTSGGATNDNTYFGYSTPWGYFDFNRFHCHFSPRDWQRLINNNWGFRPKRLSFKLFNIQVKEVTQNEGTKTIANNLTSTIQVFTDSEYQLPYVLGSAHQGCLPPFPADVFMIPQYGYLTLNNGSQAVGRSSFYCLEYFPSQMLRTGNNFQFTYTFEDVPFHSSYAHSQSLDRLMNPLIDQYLYYLSRTQTTSNGRGVTLGFSQGGPNTMANQAKNWLPGPCYRQQRVSTMSAASGSGNFAWTAGTKYHLNGRNSLANPGIAMATHKDDEERFFPSNGILIFGKQNAARDNADYSDVMLTSEEEIKTTNPVATEEYGIVADNVMEPTRAPQIGTVNSQGALPGMVWQNRDVYLQGPIWAKIPHTDGNFHPSPLMGGFGLKHPPPQILIKNTPVPADPRSTFNGDKLNSFITQYSTGQVSVEIEWELQKENSKRWNPEIQYTSNYYKSTSVDFAVNTEGVYSEPRPIGTRYLTRNL

SEQ ID NO: 351 - protein, 737 aa, Artificial Sequence
  AAV capsid variant
MAADGYLPDWLEDNLSEGIREWWALKPGAPKPKANQQKQDDGRGLVLPGYKYLGPFNGLDKGEPVNAADAAALEHDKAYDQQLQAGDNPYLRYNHADAEFQERLQEDTSFGGNLGRAVFQAKKRVLEPLGLVEEGAKTAPGKKRPVEPSPQRSPDSSTGIGKKGQQPARKRLNFGQTGDSESVPDPQPLGEPPAAPSGVGPNTMAAGGGAPMADNNEGADGVGSSSGNWHCDSTWLGDRVITTSTRTWALPTYNNHLYKQISNGTSGGATNDNTYFGYSTPWGYFDFNRFHCHFSPRDWQRLINNNWGFRPKRLSFKLFNIQVKEVTQNEGTKTIANNLTSTIQVFTDSEYQLPYVLGSAHQGCLPPFPADVFMIPQYGYLTLNNGSQAVGRSSFYCLEYFPSQMLRTGNNFQFTYTFEDVPFHSSYAHSQSLDRLMNPLIDQYLYYLSRTQTTSNGRGVTLGFSQGGPNTMANQAKNWLPGPCYRQQRVSTGTNLGKEQNFAWTAGTKYHLNGRNSLANPGIAMATHKDDEERFFPSNGILIFGKQNAARDNADYSDVMLTSEEEIKTTNPVATEEYGIVADNVMEPTRAPQIGTVNSQGALPGMVWQNRDVYLQGPIWAKIPHTDGNFHPSPLMGGFGLKHPPPQILIKNTPVPADPRSTFNGDKLNSFITQYSTGQVSVEIEWELQKENSKRWNPEIQYTSNYYKSTSVDFAVNTEGVYSEPRPIGTRYLTRNL

SEQ ID NO: 352 - protein, 737 aa, Artificial Sequence
  AAV capsid variant
MAADGYLPDWLEDNLSEGIREWWALKPGAPKPKANQQKQDDGRGLVLPGYKYLGPFNGLDKGEPVNAADAAALEHDKAYDQQLQAGDNPYLRYNHADAEFQERLQEDTSFGGNLGRAVFQAKKRVLEPLGLVEEGAKTAPGKKRPVEPSPQRSPDSSTGIGKKGQQPARKRLNFGQTGDSESVPDPQPLGEPPAAPSGVGPNTMAAGGGAPMADNNEGADGVGSSSGNWHCDSTWLGDRVITTSTRTWALPTYNNHLYKQISNGTSGGATNDNTYFGYSTPWGYFDFNRFHCHFSPRDWQRLINNNWGFRPKRLSFKLFNIQVKEVTQNEGTKTIANNLTSTIQVFTDSEYQLPYVLGSAHQGCLPPFPADVFMIPQYGYLTLNNGSQAVGRSSFYCLEYFPSQMLRTGNNFQFTYTFEDVPFHSSYAHSQSLDRLMNPLIDQYLYYLSRTQTTSNGRGVTLGFSQGGPNTMANQAKNWLPGPCYRQQRVSTSSHSGTNQNFAWTAGTKYHLNGRNSLANPGIAMATHKDDEERFFPSNGILIFGKQNAARDNADYSDVMLTSEEEIKTTNPVATEEYGIVADNVMEPTRAPQIGTVNSQGALPGMVWQNRDVYLQGPIWAKIPHTDGNFHPSPLMGGFGLKHPPPQILIKNTPVPADPRSTFNGDKLNSFITQYSTGQVSVEIEWELQKENSKRWNPEIQYTSNYYKSTSVDFAVNTEGVYSEPRPIGTRYLTRNL

SEQ ID NO: 353 - protein, 737 aa, Artificial Sequence
  AAV capsid variant
MAADGYLPDWLEDNLSEGIREWWALKPGAPKPKANQQKQDDGRGLVLPGYKYLGPFNGLDKGEPVNAADAAALEHDKAYDQQLQAGDNPYLRYNHADAEFQERLQEDTSFGGNLGRAVFQAKKRVLEPLGLVEEGAKTAPGKKRPVEPSPQRSPDSSTGIGKKGQQPARKRLNFGQTGDSESVPDPQPLGEPPAAPSGVGPNTMAAGGGAPMADNNEGADGVGSSSGNWHCDSTWLGDRVITTSTRTWALPTYNNHLYKQISNGTSGGATNDNTYFGYSTPWGYFDFNRFHCHFSPRDWQRLINNNWGFRPKRLSFKLFNIQVKEVTQNEGTKTIANNLTSTIQVFTDSEYQLPYVLGSAHQGCLPPFPADVFMIPQYGYLTLNNGSQAVGRSSFYCLEYFPSQMLRTGNNFQFTYTFEDVPFHSSYAHSQSLDRLMNPLIDQYLYYLSRTQTTSNGRGVTLGFSQGGPNTMANQAKNWLPGPCYRQQRVSTVATRDGQLNFAWTAGTKYHLNGRNSLANPGIAMATHKDDEERFFPSNGILIFGKQNAARDNADYSDVMLTSEEEIKTTNPVATEEYGIVADNVMEPTRAPQIGTVNSQGALPGMVWQNRDVYLQGPIWAKIPHTDGNFHPSPLMGGFGLKHPPPQILIKNTPVPADPRSTFNGDKLNSFITQYSTGQVSVEIEWELQKENSKRWNPEIQYTSNYYKSTSVDFAVNTEGVYSEPRPIGTRYLTRNL

SEQ ID NO: 354 - protein, 737 aa, Artificial Sequence
  AAV capsid variant
MAADGYLPDWLEDNLSEGIREWWALKPGAPKPKANQQKQDDGRGLVLPGYKYLGPFNGLDKGEPVNAADAAALEHDKAYDQQLQAGDNPYLRYNHADAEFQERLQEDTSFGGNLGRAVFQAKKRVLEPLGLVEEGAKTAPGKKRPVEPSPQRSPDSSTGIGKKGQQPARKRLNFGQTGDSESVPDPQPLGEPPAAPSGVGPNTMAAGGGAPMADNNEGADGVGSSSGNWHCDSTWLGDRVITTSTRTWALPTYNNHLYKQISNGTSGGATNDNTYFGYSTPWGYFDFNRFHCHFSPRDWQRLINNNWGFRPKRLSFKLFNIQVKEVTQNEGTKTIANNLTSTIQVFTDSEYQLPYVLGSAHQGCLPPFPADVFMIPQYGYLTLNNGSQAVGRSSFYCLEYFPSQMLRTGNNFQFTYTFEDVPFHSSYAHSQSLDRLMNPLIDQYLYYLSRTQTTSNGRGVTLGFSQGGPNTMANQAKNWLPGPCYRQQRVSTALNADTGTNFAWTAGTKYHLNGRNSLANPGIAMATHKDDEERFFPSNGILIFGKQNAARDNADYSDVMLTSEEEIKTTNPVATEEYGIVADNVMEPTRAPQIGTVNSQGALPGMVWQNRDVYLQGPIWAKIPHTDGNFHPSPLMGGFGLKHPPPQILIKNTPVPADPRSTFNGDKLNSFITQYSTGQVSVEIEWELQKENSKRWNPEIQYTSNYYKSTSVDFAVNTEGVYSEPRPIGTRYLTRNL

SEQ ID NO: 355 - protein, 737 aa, Artificial Sequence
  AAV capsid variant
MAADGYLPDWLEDNLSEGIREWWALKPGAPQPKANQQHQDNARGLVLPGYKYLGPGNGLDKGEPVNAADAAALEHDKAYDQQLKAGDNPYLKYNHADAEFQERLKEDTSFGGNLGRAVFQAKKRLLEPLGLVEEAAKTAPGKKRPVEQSPQEPDSSAGIGKSGAQPAKKRLNFGQTGDSESVPDPQPLGEPPAAPSGVGPNTMAAGGGAPMADNNEGADGVGSSSGNWHCDSTWLGDRVITTSTRTWALPTYNNHLYKQISNGTSGGATNDNTYFGYSTPWGYFDFNRFHCHFSPRDWQRLINNNWGFRPKRLSFKLFNIQVKEVTQNEGTKTIANNLTSTIQVFTDSEYQLPYVLGSAHQGCLPPFPADVFMIPQYGYLTLNNGSQAVGRSSFYCLEYFPSQMLRTGNNFQFTYTFEDVPFHSSYAHSQSLDRLMNPLIDQYLYYLSRTQTTGGTANTQTLGFSQGGPNTMANQAKNWLPGPCYRQQRVSTTTGQNNNSNFAWTAGTKYHLNGRNSLANPGIAMATHKDDEERFFPSNGILIFGKQNAARDNADYSDVMLTSEEEIKTTNPVATEEYGIVADNLQQQNTAPQIGTVNSQGALPGMVWQNRDVYLQGPIWAKIPHTDGNFHPSPLMGGFGLKHPPPQILIKNTPVPADPRSTFNGDKLNSFITQYSTGQVSVEIEWELQKENSKRWNPEIQYTSNYYKSTSVDFAVNTEGVYSEPRPIGTRYLTRNL

SEQ ID NO: 356 - protein, 736 aa, Artificial Sequence
  AAV capsid variant
MAADGYLPDWLEDNLSEGIREWWALKPGAPQPKANQQHQDNARGLVLPGYKYLGPGNGLDKGEPVNAADAAALEHDKAYDQQLKAGDNPYLKYNHADAEFQERLKEDTSFGGNLGRAVFQAKKRLLEPLGLVEEAAKTAPGKKRPVEQSPQEPDSSAGIGKSGAQPAKKRLNFGQTGDSESVPDPQPLGEPPAAPSGVGPNTMAAGGGAPMADNNEGADGVGSSSGNWHCDSTWLGDRVITTSTRTWALPTYNNHLYKQISNGTSGGATNDNTYFGYSTPWGYFDFNRFHCHFSPRDWQRLINNNWGFRPKRLSFKLFNIQVKEVTQNEGTKTIANNLTSTIQVFTDSEYQLPYVLGSAHQGCLPPFPADVFMIPQYGYLTLNNGSQAVGRSSFYCLEYFPSQMLRTGNNFQFTYTFEDVPFHSSYAHSQSLDRLMNPLIDQYLYYLSRTQTTSNGRGVTLGFSQGGPNTMANQAKNWLPGPCYRQQRVSTTTGQNNNSNFAWTAGTKYHLNGRNSLANPGIAMATHKDDEERFFPSNGILIFGKQNAARDNADYSDVMLTSEEEIKTTNPVATEEYGIVADNLQQQNTAPQIGTVNSQGALPGMVWQNRDVYLQGPIWAKIPHTDGNFHPSPLMGGFGLKHPPPQILIKNTPVPADPRSTFNGDKLNSFITQYSTGQVSVEIEWELQKENSKRWNPEIQYTSNYYKSTSVDFAVNTEGVYSEPRPIGTRYLTRNL

SEQ ID NO: 357 - protein, 737 aa, Artificial Sequence
  AAV capsid variant
MAADGYLPDWLEDNLSEGIREWWALKPGAPQPKANQQHQDNARGLVLPGYKYLGPGNGLDKGEPVNAADAAALEHDKAYDQQLKAGDNPYLKYNHADAEFQERLKEDTSFGGNLGRAVFQAKKRLLEPLGLVEEAAKTAPGKKRPVEQSPQEPDSSAGIGKSGAQPAKKRLNFGQTGDSESVPDPQPLGEPPAAPSGVGPNTMAAGGGAPMADNNEGADGVGSSSGNWHCDSTWLGDRVITTSTRTWALPTYNNHLYKQISNGTSGGATNDNTYFGYSTPWGYFDFNRFHCHFSPRDWQRLINNNWGFRPKRLSFKLFNIQVKEVTQNEGTKTIANNLTSTIQVFTDSEYQLPYVLGSAHQGCLPPFPADVFMIPQYGYLTLNNGSQAVGRSSFYCLEYFPSQMLRTGNNFQFTYTFEDVPFHSSYAHSQSLDRLMNPLIDQYLYYLSRTQTTGGTANTQTLGFSQGGPNTMANQAKNWLPGPCYRQQRVSTNLAENFKYNFAWTAGTKYHLNGRNSLANPGIAMATHKDDEERFFPSNGILIFGKQNAARDNADYSDVMLTSEEEIKTTNPVATEEYGIVADNLQQQNTAPQIGTVNSQGALPGMVWQNRDVYLQGPIWAKIPHTDGNFHPSPLMGGFGLKHPPPQILIKNTPVPADPRSTFNGDKLNSFITQYSTGQVSVEIEWELQKENSKRWNPEIQYTSNYYKSTSVDFAVNTEGVYSEPRPIGTRYLTRNL

SEQ ID NO: 358 - protein, 737 aa, Artificial Sequence
  AAV capsid variant
MAADGYLPDWLEDNLSEGIREWWALKPGAPQPKANQQHQDNARGLVLPGYKYLGPGNGLDKGEPVNAADAAALEHDKAYDQQLKAGDNPYLKYNHADAEFQERLKEDTSFGGNLGRAVFQAKKRLLEPLGLVEEAAKTAPGKKRPVEQSPQEPDSSAGIGKSGAQPAKKRLNFGQTGDSESVPDPQPLGEPPAAPSGVGPNTMAAGGGAPMADNNEGADGVGSSSGNWHCDSTWLGDRVITTSTRTWALPTYNNHLYKQISNGTSGGATNDNTYFGYSTPWGYFDFNRFHCHFSPRDWQRLINNNWGFRPKRLSFKLFNIQVKEVTQNEGTKTIANNLTSTIQVFTDSEYQLPYVLGSAHQGCLPPFPADVFMIPQYGYLTLNNGSQAVGRSSFYCLEYFPSQMLRTGNNFQFTYTFEDVPFHSSYAHSQSLDRLMNPLIDQYLYYLSRTQTTGGTANTQTLGFSQGGPNTMANQAKNWLPGPCYRQQRVSTVLSGDHSANFAWTAGTKYHLNGRNSLANPGIAMATHKDDEERFFPSNGILIFGKQNAARDNADYSDVMLTSEEEIKTTNPVATEEYGIVADNLQQQNTAPQIGTVNSQGALPGMVWQNRDVYLQGPIWAKIPHTDGNFHPSPLMGGFGLKHPPPQILIKNTPVPADPRSTFNGDKLNSFITQYSTGQVSVEIEWELQKENSKRWNPEIQYTSNYYKSTSVDFAVNTEGVYSEPRPIGTRYLTRNL

SEQ ID NO: 359 - protein, 737 aa, Artificial Sequence
  AAV capsid variant
MAADGYLPDWLEDNLSEGIREWWALKPGAPQPKANQQHQDNARGLVLPGYKYLGPGNGLDKGEPVNAADAAALEHDKAYDQQLKAGDNPYLKYNHADAEFQERLKEDTSFGGNLGRAVFQAKKRLLEPLGLVEEAAKTAPGKKRPVEQSPQEPDSSAGIGKSGAQPAKKRLNFGQTGDSESVPDPQPLGEPPAAPSGVGPNTMAAGGGAPMADNNEGADGVGSSSGNWHCDSTWLGDRVITTSTRTWALPTYNNHLYKQISNGTSGGATNDNTYFGYSTPWGYFDFNRFHCHFSPRDWQRLINNNWGFRPKRLSFKLFNIQVKEVTQNEGTKTIANNLTSTIQVFTDSEYQLPYVLGSAHQGCLPPFPADVFMIPQYGYLTLNNGSQAVGRSSFYCLEYFPSQMLRTGNNFQFTYTFEDVPFHSSYAHSQSLDRLMNPLIDQYLYYLSRTQTTGGTANTQTLGFSQGGPNTMANQAKNWLPGPCYRQQRVSTMSAASGSGNFAWTAGTKYHLNGRNSLANPGIAMATHKDDEERFFPSNGILIFGKQNAARDNADYSDVMLTSEEEIKTTNPVATEEYGIVADNLQQQNTAPQIGTVNSQGALPGMVWQNRDVYLQGPIWAKIPHTDGNFHPSPLMGGFGLKHPPPQILIKNTPVPADPRSTFNGDKLNSFITQYSTGQVSVEIEWELQKENSKRWNPEIQYTSNYYKSTSVDFAVNTEGVYSEPRPIGTRYLTRNL

SEQ ID NO: 360 - protein, 737 aa, Artificial Sequence
  AAV capsid variant
MAADGYLPDWLEDNLSEGIREWWALKPGAPQPKANQQHQDNARGLVLPGYKYLGPGNGLDKGEPVNAADAAALEHDKAYDQQLKAGDNPYLKYNHADAEFQERLKEDTSFGGNLGRAVFQAKKRLLEPLGLVEEAAKTAPGKKRPVEQSPQEPDSSAGIGKSGAQPAKKRLNFGQTGDSESVPDPQPLGEPPAAPSGVGPNTMAAGGGAPMADNNEGADGVGSSSGNWHCDSTWLGDRVITTSTRTWALPTYNNHLYKQISNGTSGGATNDNTYFGYSTPWGYFDFNRFHCHFSPRDWQRLINNNWGFRPKRLSFKLFNIQVKEVTQNEGTKTIANNLTSTIQVFTDSEYQLPYVLGSAHQGCLPPFPADVFMIPQYGYLTLNNGSQAVGRSSFYCLEYFPSQMLRTGNNFQFTYTFEDVPFHSSYAHSQSLDRLMNPLIDQYLYYLSRTQTTGGTANTQTLGFSQGGPNTMANQAKNWLPGPCYRQQRVSTGTNLGKEQNFAWTAGTKYHLNGRNSLANPGIAMATHKDDEERFFPSNGILIFGKQNAARDNADYSDVMLTSEEEIKTTNPVATEEYGIVADNLQQQNTAPQIGTVNSQGALPGMVWQNRDVYLQGPIWAKIPHTDGNFHPSPLMGGFGLKHPPPQILIKNTPVPADPRSTFNGDKLNSFITQYSTGQVSVEIEWELQKENSKRWNPEIQYTSNYYKSTSVDFAVNTEGVYSEPRPIGTRYLTRNL

SEQ ID NO: 361 - protein, 737 aa, Artificial Sequence
  AAV capsid variant
MAADGYLPDWLEDNLSEGIREWWALKPGAPQPKANQQHQDNARGLVLPGYKYLGPGNGLDKGEPVNAADAAALEHDKAYDQQLKAGDNPYLKYNHADAEFQERLKEDTSFGGNLGRAVFQAKKRLLEPLGLVEEAAKTAPGKKRPVEQSPQEPDSSAGIGKSGAQPAKKRLNFGQTGDSESVPDPQPLGEPPAAPSGVGPNTMAAGGGAPMADNNEGADGVGSSSGNWHCDSTWLGDRVITTSTRTWALPTYNNHLYKQISNGTSGGATNDNTYFGYSTPWGYFDFNRFHCHFSPRDWQRLINNNWGFRPKRLSFKLFNIQVKEVTQNEGTKTIANNLTSTIQVFTDSEYQLPYVLGSAHQGCLPPFPADVFMIPQYGYLTLNNGSQAVGRSSFYCLEYFPSQMLRTGNNFQFTYTFEDVPFHSSYAHSQSLDRLMNPLIDQYLYYLSRTQTTGGTANTQTLGFSQGGPNTMANQAKNWLPGPCYRQQRVSTSSHSGTNQNFAWTAGTKYHLNGRNSLANPGIAMATHKDDEERFFPSNGILIFGKQNAARDNADYSDVMLTSEEEIKTTNPVATEEYGIVADNLQQQNTAPQIGTVNSQGALPGMVWQNRDVYLQGPIWAKIPHTDGNFHPSPLMGGFGLKHPPPQILIKNTPVPADPRSTFNGDKLNSFITQYSTGQVSVEIEWELQKENSKRWNPEIQYTSNYYKSTSVDFAVNTEGVYSEPRPIGTRYLTRNL

SEQ ID NO: 362 - protein, 737 aa, Artificial Sequence
  AAV capsid variant
MAADGYLPDWLEDNLSEGIREWWALKPGAPQPKANQQHQDNARGLVLPGYKYLGPGNGLDKGEPVNAADAAALEHDKAYDQQLKAGDNPYLKYNHADAEFQERLKEDTSFGGNLGRAVFQAKKRLLEPLGLVEEAAKTAPGKKRPVEQSPQEPDSSAGIGKSGAQPAKKRLNFGQTGDSESVPDPQPLGEPPAAPSGVGPNTMAAGGGAPMADNNEGADGVGSSSGNWHCDSTWLGDRVITTSTRTWALPTYNNHLYKQISNGTSGGATNDNTYFGYSTPWGYFDFNRFHCHFSPRDWQRLINNNWGFRPKRLSFKLFNIQVKEVTQNEGTKTIANNLTSTIQVFTDSEYQLPYVLGSAHQGCLPPFPADVFMIPQYGYLTLNNGSQAVGRSSFYCLEYFPSQMLRTGNNFQFTYTFEDVPFHSSYAHSQSLDRLMNPLIDQYLYYLSRTQTTGGTANTQTLGFSQGGPNTMANQAKNWLPGPCYRQQRVSTVATRDGQLNFAWTAGTKYHLNGRNSLANPGIAMATHKDDEERFFPSNGILIFGKQNAARDNADYSDVMLTSEEEIKTTNPVATEEYGIVADNLQQQNTAPQIGTVNSQGALPGMVWQNRDVYLQGPIWAKIPHTDGNFHPSPLMGGFGLKHPPPQILIKNTPVPADPRSTFNGDKLNSFITQYSTGQVSVEIEWELQKENSKRWNPEIQYTSNYYKSTSVDFAVNTEGVYSEPRPIGTRYLTRNL

SEQ ID NO: 363 - protein, 737 aa, Artificial Sequence
  AAV capsid variant
MAADGYLPDWLEDNLSEGIREWWALKPGAPQPKANQQHQDNARGLVLPGYKYLGPGNGLDKGEPVNAADAAALEHDKAYDQQLKAGDNPYLKYNHADAEFQERLKEDTSFGGNLGRAVFQAKKRLLEPLGLVEEAAKTAPGKKRPVEQSPQEPDSSAGIGKSGAQPAKKRLNFGQTGDSESVPDPQPLGEPPAAPSGVGPNTMAAGGGAPMADNNEGADGVGSSSGNWHCDSTWLGDRVITTSTRTWALPTYNNHLYKQISNGTSGGATNDNTYFGYSTPWGYFDFNRFHCHFSPRDWQRLINNNWGFRPKRLSFKLFNIQVKEVTQNEGTKTIANNLTSTIQVFTDSEYQLPYVLGSAHQGCLPPFPADVFMIPQYGYLTLNNGSQAVGRSSFYCLEYFPSQMLRTGNNFQFTYTFEDVPFHSSYAHSQSLDRLMNPLIDQYLYYLSRTQTTGGTANTQTLGFSQGGPNTMANQAKNWLPGPCYRQQRVSTALNADTGTNFAWTAGTKYHLNGRNSLANPGIAMATHKDDEERFFPSNGILIFGKQNAARDNADYSDVMLTSEEEIKTTNPVATEEYGIVADNLQQQNTAPQIGTVNSQGALPGMVWQNRDVYLQGPIWAKIPHTDGNFHPSPLMGGFGLKHPPPQILIKNTPVPADPRSTFNGDKLNSFITQYSTGQVSVEIEWELQKENSKRWNPEIQYTSNYYKSTSVDFAVNTEGVYSEPRPIGTRYLTRNL

SEQ ID NO: 364 - protein, 737 aa, Artificial Sequence
  AAV capsid variant
MAADGYLPDWLEDNLSEGIREWWALKPGAPQPKANQQHQDNARGLVLPGYKYLGPGNGLDKGEPVNAADAAALEHDKAYDQQLKAGDNPYLKYNHADAEFQERLKEDTSFGGNLGRAVFQAKKRLLEPLGLVEEAAKTAPGKKRPVEQSPQEPDSSAGIGKSGAQPAKKRLNFGQTGDSESVPDPQPLGEPPAAPSGVGPNTMAAGGGAPMADNNEGADGVGSSSGNWHCDSTWLGDRVITTSTRTWALPTYNNHLYKQISNGTSGGATNDNTYFGYSTPWGYFDFNRFHCHFSPRDWQRLINNNWGFRPKRLSFKLFNIQVKEVTQNEGTKTIANNLTSTIQVFTDSEYQLPYVLGSAHQGCLPPFPADVFMIPQYGYLTLNNGSQAVGRSSFYCLEYFPSQMLRTGNNFQFTYTFEDVPFHSSYAHSQSLDRLMNPLIDQYLYYLSRTQTTGGTANTQTLGFSQGGPNTMANQAKNWLPGPCYRQQRVSTTTGQNNNSNFAWTAGTKYHLNGRNSLANPGIAMATHKDDEERFFPSNGILIFGKQNAARDNADYSDVMLTSEEEIKTTNPVATEEYGIVADNVMEPTRAPQIGTVNSQGALPGMVWQNRDVYLQGPIWAKIPHTDGNFHPSPLMGGFGLKHPPPQILIKNTPVPADPRSTFNGDKLNSFITQYSTGQVSVEIEWELQKENSKRWNPEIQYTSNYYKSTSVDFAVNTEGVYSEPRPIGTRYLTRNL

SEQ ID NO: 365 - protein, 736 aa, Artificial Sequence
  AAV capsid variant
MAADGYLPDWLEDNLSEGIREWWALKPGAPQPKANQQHQDNARGLVLPGYKYLGPGNGLDKGEPVNAADAAALEHDKAYDQQLKAGDNPYLKYNHADAEFQERLKEDTSFGGNLGRAVFQAKKRLLEPLGLVEEAAKTAPGKKRPVEQSPQEPDSSAGIGKSGAQPAKKRLNFGQTGDSESVPDPQPLGEPPAAPSGVGPNTMAAGGGAPMADNNEGADGVGSSSGNWHCDSTWLGDRVITTSTRTWALPTYNNHLYKQISNGTSGGATNDNTYFGYSTPWGYFDFNRFHCHFSPRDWQRLINNNWGFRPKRLSFKLFNIQVKEVTQNEGTKTIANNLTSTIQVFTDSEYQLPYVLGSAHQGCLPPFPADVFMIPQYGYLTLNNGSQAVGRSSFYCLEYFPSQMLRTGNNFQFTYTFEDVPFHSSYAHSQSLDRLMNPLIDQYLYYLSRTQTTSNGRGVTLGFSQGGPNTMANQAKNWLPGPCYRQQRVSTTTGQNNNSNFAWTAGTKYHLNGRNSLANPGIAMATHKDDEERFFPSNGILIFGKQNAARDNADYSDVMLTSEEEIKTTNPVATEEYGIVADNVMEPTRAPQIGTVNSQGALPGMVWQNRDVYLQGPIWAKIPHTDGNFHPSPLMGGFGLKHPPPQILIKNTPVPADPRSTFNGDKLNSFITQYSTGQVSVEIEWELQKENSKRWNPEIQYTSNYYKSTSVDFAVNTEGVYSEPRPIGTRYLTRNL

SEQ ID NO: 366 - protein, 736 aa, Artificial Sequence
  AAV capsid variant
MAADGYLPDWLEDNLSEGIREWWALKPGAPQPKANQQHQDNARGLVLPGYKYLGPGNGLDKGEPVNAADAAALEHDKAYDQQLKAGDNPYLKYNHADAEFQERLKEDTSFGGNLGRAVFQAKKRLLEPLGLVEEAAKTAPGKKRPVEQSPQEPDSSAGIGKSGAQPAKKRLNFGQTGDSESVPDPQPLGEPPAAPSGVGPNTMAAGGGAPMADNNEGADGVGSSSGNWHCDSTWLGDRVITTSTRTWALPTYNNHLYKQISNGTSGGATNDNTYFGYSTPWGYFDFNRFHCHFSPRDWQRLINNNWGFRPKRLSFKLFNIQVKEVTQNEGTKTIANNLTSTIQVFTDSEYQLPYVLGSAHQGCLPPFPADVFMIPQYGYLTLNNGSQAVGRSSFYCLEYFPSQMLRTGNNFQFTYTFEDVPFHSSYAHSQSLDRLMNPLIDQYLYYLSRTQTTSNGRGVTLGFSQGGPNTMANQAKNWLPGPCYRQQRVSTNLAENFKYNFAWTAGTKYHLNGRNSLANPGIAMATHKDDEERFFPSNGILIFGKQNAARDNADYSDVMLTSEEEIKTTNPVATEEYGIVADNLQQQNTAPQIGTVNSQGALPGMVWQNRDVYLQGPIWAKIPHTDGNFHPSPLMGGFGLKHPPPQILIKNTPVPADPRSTFNGDKLNSFITQYSTGQVSVEIEWELQKENSKRWNPEIQYTSNYYKSTSVDFAVNTEGVYSEPRPIGTRYLTRNL

SEQ ID NO: 367 - protein, 736 aa, Artificial Sequence
  AAV capsid variant
MAADGYLPDWLEDNLSEGIREWWALKPGAPQPKANQQHQDNARGLVLPGYKYLGPGNGLDKGEPVNAADAAALEHDKAYDQQLKAGDNPYLKYNHADAEFQERLKEDTSFGGNLGRAVFQAKKRLLEPLGLVEEAAKTAPGKKRPVEQSPQEPDSSAGIGKSGAQPAKKRLNFGQTGDSESVPDPQPLGEPPAAPSGVGPNTMAAGGGAPMADNNEGADGVGSSSGNWHCDSTWLGDRVITTSTRTWALPTYNNHLYKQISNGTSGGATNDNTYFGYSTPWGYFDFNRFHCHFSPRDWQRLINNNWGFRPKRLSFKLFNIQVKEVTQNEGTKTIANNLTSTIQVFTDSEYQLPYVLGSAHQGCLPPFPADVFMIPQYGYLTLNNGSQAVGRSSFYCLEYFPSQMLRTGNNFQFTYTFEDVPFHSSYAHSQSLDRLMNPLIDQYLYYLSRTQTTSNGRGVTLGFSQGGPNTMANQAKNWLPGPCYRQQRVSTVLSGDHSANFAWTAGTKYHLNGRNSLANPGIAMATHKDDEERFFPSNGILIFGKQNAARDNADYSDVMLTSEEEIKTTNPVATEEYGIVADNLQQQNTAPQIGTVNSQGALPGMVWQNRDVYLQGPIWAKIPHTDGNFHPSPLMGGFGLKHPPPQILIKNTPVPADPRSTFNGDKLNSFITQYSTGQVSVEIEWELQKENSKRWNPEIQYTSNYYKSTSVDFAVNTEGVYSEPRPIGTRYLTRNL

SEQ ID NO: 368 - protein, 736 aa, Artificial Sequence
  AAV capsid variant
MAADGYLPDWLEDNLSEGIREWWALKPGAPQPKANQQHQDNARGLVLPGYKYLGPGNGLDKGEPVNAADAAALEHDKAYDQQLKAGDNPYLKYNHADAEFQERLKEDTSFGGNLGRAVFQAKKRLLEPLGLVEEAAKTAPGKKRPVEQSPQEPDSSAGIGKSGAQPAKKRLNFGQTGDSESVPDPQPLGEPPAAPSGVGPNTMAAGGGAPMADNNEGADGVGSSSGNWHCDSTWLGDRVITTSTRTWALPTYNNHLYKQISNGTSGGATNDNTYFGYSTPWGYFDFNRFHCHFSPRDWQRLINNNWGFRPKRLSFKLFNIQVKEVTQNEGTKTIANNLTSTIQVFTDSEYQLPYVLGSAHQGCLPPFPADVFMIPQYGYLTLNNGSQAVGRSSFYCLEYFPSQMLRTGNNFQFTYTFEDVPFHSSYAHSQSLDRLMNPLIDQYLYYLSRTQTTSNGRGVTLGFSQGGPNTMANQAKNWLPGPCYRQQRVSTMSAASGSGNFAWTAGTKYHLNGRNSLANPGIAMATHKDDEERFFPSNGILIFGKQNAARDNADYSDVMLTSEEEIKTTNPVATEEYGIVADNLQQQNTAPQIGTVNSQGALPGMVWQNRDVYLQGPIWAKIPHTDGNFHPSPLMGGFGLKHPPPQILIKNTPVPADPRSTFNGDKLNSFITQYSTGQVSVEIEWELQKENSKRWNPEIQYTSNYYKSTSVDFAVNTEGVYSEPRPIGTRYLTRNL

SEQ ID NO: 369 - protein, 736 aa, Artificial Sequence
  AAV capsid variant
MAADGYLPDWLEDNLSEGIREWWALKPGAPQPKANQQHQDNARGLVLPGYKYLGPGNGLDKGEPVNAADAAALEHDKAYDQQLKAGDNPYLKYNHADAEFQERLKEDTSFGGNLGRAVFQAKKRLLEPLGLVEEAAKTAPGKKRPVEQSPQEPDSSAGIGKSGAQPAKKRLNFGQTGDSESVPDPQPLGEPPAAPSGVGPNTMAAGGGAPMADNNEGADGVGSSSGNWHCDSTWLGDRVITTSTRTWALPTYNNHLYKQISNGTSGGATNDNTYFGYSTPWGYFDFNRFHCHFSPRDWQRLINNNWGFRPKRLSFKLFNIQVKEVTQNEGTKTIANNLTSTIQVFTDSEYQLPYVLGSAHQGCLPPFPADVFMIPQYGYLTLNNGSQAVGRSSFYCLEYFPSQMLRTGNNFQFTYTFEDVPFHSSYAHSQSLDRLMNPLIDQYLYYLSRTQTTSNGRGVTLGFSQGGPNTMANQAKNWLPGPCYRQQRVSTGTNLGKEQNFAWTAGTKYHLNGRNSLANPGIAMATHKDDEERFFPSNGILIFGKQNAARDNADYSDVMLTSEEEIKTTNPVATEEYGIVADNLQQQNTAPQIGTVNSQGALPGMVWQNRDVYLQGPIWAKIPHTDGNFHPSPLMGGFGLKHPPPQILIKNTPVPADPRSTFNGDKLNSFITQYSTGQVSVEIEWELQKENSKRWNPEIQYTSNYYKSTSVDFAVNTEGVYSEPRPIGTRYLTRNL

SEQ ID NO: 370 - protein, 736 aa, Artificial Sequence
  AAV capsid variant
MAADGYLPDWLEDNLSEGIREWWALKPGAPQPKANQQHQDNARGLVLPGYKYLGPGNGLDKGEPVNAADAAALEHDKAYDQQLKAGDNPYLKYNHADAEFQERLKEDTSFGGNLGRAVFQAKKRLLEPLGLVEEAAKTAPGKKRPVEQSPQEPDSSAGIGKSGAQPAKKRLNFGQTGDSESVPDPQPLGEPPAAPSGVGPNTMAAGGGAPMADNNEGADGVGSSSGNWHCDSTWLGDRVITTSTRTWALPTYNNHLYKQISNGTSGGATNDNTYFGYSTPWGYFDFNRFHCHFSPRDWQRLINNNWGFRPKRLSFKLFNIQVKEVTQNEGTKTIANNLTSTIQVFTDSEYQLPYVLGSAHQGCLPPFPADVFMIPQYGYLTLNNGSQAVGRSSFYCLEYFPSQMLRTGNNFQFTYTFEDVPFHSSYAHSQSLDRLMNPLIDQYLYYLSRTQTTSNGRGVTLGFSQGGPNTMANQAKNWLPGPCYRQQRVSTSSHSGTNQNFAWTAGTKYHLNGRNSLANPGIAMATHKDDEERFFPSNGILIFGKQNAARDNADYSDVMLTSEEEIKTTNPVATEEYGIVADNLQQQNTAPQIGTVNSQGALPGMVWQNRDVYLQGPIWAKIPHTDGNFHPSPLMGGFGLKHPPPQILIKNTPVPADPRSTFNGDKLNSFITQYSTGQVSVEIEWELQKENSKRWNPEIQYTSNYYKSTSVDFAVNTEGVYSEPRPIGTRYLTRNL

SEQ ID NO: 371 - protein, 736 aa, Artificial Sequence
  AAV capsid variant
MAADGYLPDWLEDNLSEGIREWWALKPGAPQPKANQQHQDNARGLVLPGYKYLGPGNGLDKGEPVNAADAAALEHDKAYDQQLKAGDNPYLKYNHADAEFQERLKEDTSFGGNLGRAVFQAKKRLLEPLGLVEEAAKTAPGKKRPVEQSPQEPDSSAGIGKSGAQPAKKRLNFGQTGDSESVPDPQPLGEPPAAPSGVGPNTMAAGGGAPMADNNEGADGVGSSSGNWHCDSTWLGDRVITTSTRTWALPTYNNHLYKQISNGTSGGATNDNTYFGYSTPWGYFDFNRFHCHFSPRDWQRLINNNWGFRPKRLSFKLFNIQVKEVTQNEGTKTIANNLTSTIQVFTDSEYQLPYVLGSAHQGCLPPFPADVFMIPQYGYLTLNNGSQAVGRSSFYCLEYFPSQMLRTGNNFQFTYTFEDVPFHSSYAHSQSLDRLMNPLIDQYLYYLSRTQTTSNGRGVTLGFSQGGPNTMANQAKNWLPGPCYRQQRVSTVATRDGQLNFAWTAGTKYHLNGRNSLANPGIAMATHKDDEERFFPSNGILIFGKQNAARDNADYSDVMLTSEEEIKTTNPVATEEYGIVADNLQQQNTAPQIGTVNSQGALPGMVWQNRDVYLQGPIWAKIPHTDGNFHPSPLMGGFGLKHPPPQILIKNTPVPADPRSTFNGDKLNSFITQYSTGQVSVEIEWELQKENSKRWNPEIQYTSNYYKSTSVDFAVNTEGVYSEPRPIGTRYLTRNL

SEQ ID NO: 372 - protein, 736 aa, Artificial Sequence
  AAV capsid variant
MAADGYLPDWLEDNLSEGIREWWALKPGAPQPKANQQHQDNARGLVLPGYKYLGPGNGLDKGEPVNAADAAALEHDKAYDQQLKAGDNPYLKYNHADAEFQERLKEDTSFGGNLGRAVFQAKKRLLEPLGLVEEAAKTAPGKKRPVEQSPQEPDSSAGIGKSGAQPAKKRLNFGQTGDSESVPDPQPLGEPPAAPSGVGPNTMAAGGGAPMADNNEGADGVGSSSGNWHCDSTWLGDRVITTSTRTWALPTYNNHLYKQISNGTSGGATNDNTYFGYSTPWGYFDFNRFHCHFSPRDWQRLINNNWGFRPKRLSFKLFNIQVKEVTQNEGTKTIANNLTSTIQVFTDSEYQLPYVLGSAHQGCLPPFPADVFMIPQYGYLTLNNGSQAVGRSSFYCLEYFPSQMLRTGNNFQFTYTFEDVPFHSSYAHSQSLDRLMNPLIDQYLYYLSRTQTTSNGRGVTLGFSQGGPNTMANQAKNWLPGPCYRQQRVSTALNADTGTNFAWTAGTKYHLNGRNSLANPGIAMATHKDDEERFFPSNGILIFGKQNAARDNADYSDVMLTSEEEIKTTNPVATEEYGIVADNLQQQNTAPQIGTVNSQGALPGMVWQNRDVYLQGPIWAKIPHTDGNFHPSPLMGGFGLKHPPPQILIKNTPVPADPRSTFNGDKLNSFITQYSTGQVSVEIEWELQKENSKRWNPEIQYTSNYYKSTSVDFAVNTEGVYSEPRPIGTRYLTRNL

SEQ ID NO: 373 - protein, 737 aa, Artificial Sequence
  AAV capsid variant
MAADGYLPDWLEDNLSEGIREWWALKPGAPQPKANQQHQDNARGLVLPGYKYLGPGNGLDKGEPVNAADAAALEHDKAYDQQLKAGDNPYLKYNHADAEFQERLKEDTSFGGNLGRAVFQAKKRLLEPLGLVEEAAKTAPGKKRPVEQSPQEPDSSAGIGKSGAQPAKKRLNFGQTGDSESVPDPQPLGEPPAAPSGVGPNTMAAGGGAPMADNNEGADGVGSSSGNWHCDSTWLGDRVITTSTRTWALPTYNNHLYKQISNGTSGGATNDNTYFGYSTPWGYFDFNRFHCHFSPRDWQRLINNNWGFRPKRLSFKLFNIQVKEVTQNEGTKTIANNLTSTIQVFTDSEYQLPYVLGSAHQGCLPPFPADVFMIPQYGYLTLNNGSQAVGRSSFYCLEYFPSQMLRTGNNFQFTYTFEDVPFHSSYAHSQSLDRLMNPLIDQYLYYLSRTQTTGGTANTQTLGFSQGGPNTMANQAKNWLPGPCYRQQRVSTNLAENFKYNFAWTAGTKYHLNGRNSLANPGIAMATHKDDEERFFPSNGILIFGKQNAARDNADYSDVMLTSEEEIKTTNPVATEEYGIVADNVMEPTRAPQIGTVNSQGALPGMVWQNRDVYLQGPIWAKIPHTDGNFHPSPLMGGFGLKHPPPQILIKNTPVPADPRSTFNGDKLNSFITQYSTGQVSVEIEWELQKENSKRWNPEIQYTSNYYKSTSVDFAVNTEGVYSEPRPIGTRYLTRNL

SEQ ID NO: 374 - protein, 737 aa, Artificial Sequence
  AAV capsid variant
MAADGYLPDWLEDNLSEGIREWWALKPGAPQPKANQQHQDNARGLVLPGYKYLGPGNGLDKGEPVNAADAAALEHDKAYDQQLKAGDNPYLKYNHADAEFQERLKEDTSFGGNLGRAVFQAKKRLLEPLGLVEEAAKTAPGKKRPVEQSPQEPDSSAGIGKSGAQPAKKRLNFGQTGDSESVPDPQPLGEPPAAPSGVGPNTMAAGGGAPMADNNEGADGVGSSSGNWHCDSTWLGDRVITTSTRTWALPTYNNHLYKQISNGTSGGATNDNTYFGYSTPWGYFDFNRFHCHFSPRDWQRLINNNWGFRPKRLSFKLFNIQVKEVTQNEGTKTIANNLTSTIQVFTDSEYQLPYVLGSAHQGCLPPFPADVFMIPQYGYLTLNNGSQAVGRSSFYCLEYFPSQMLRTGNNFQFTYTFEDVPFHSSYAHSQSLDRLMNPLIDQYLYYLSRTQTTGGTANTQTLGFSQGGPNTMANQAKNWLPGPCYRQQRVSTVLSGDHSANFAWTAGTKYHLNGRNSLANPGIAMATHKDDEERFFPSNGILIFGKQNAARDNADYSDVMLTSEEEIKTTNPVATEEYGIVADNVMEPTRAPQIGTVNSQGALPGMVWQNRDVYLQGPIWAKIPHTDGNFHPSPLMGGFGLKHPPPQILIKNTPVPADPRSTFNGDKLNSFITQYSTGQVSVEIEWELQKENSKRWNPEIQYTSNYYKSTSVDFAVNTEGVYSEPRPIGTRYLTRNL

SEQ ID NO: 375 - protein, 737 aa, Artificial Sequence
  AAV capsid variant
MAADGYLPDWLEDNLSEGIREWWALKPGAPQPKANQQHQDNARGLVLPGYKYLGPGNGLDKGEPVNAADAAALEHDKAYDQQLKAGDNPYLKYNHADAEFQERLKEDTSFGGNLGRAVFQAKKRLLEPLGLVEEAAKTAPGKKRPVEQSPQEPDSSAGIGKSGAQPAKKRLNFGQTGDSESVPDPQPLGEPPAAPSGVGPNTMAAGGGAPMADNNEGADGVGSSSGNWHCDSTWLGDRVITTSTRTWALPTYNNHLYKQISNGTSGGATNDNTYFGYSTPWGYFDFNRFHCHFSPRDWQRLINNNWGFRPKRLSFKLFNIQVKEVTQNEGTKTIANNLTSTIQVFTDSEYQLPYVLGSAHQGCLPPFPADVFMIPQYGYLTLNNGSQAVGRSSFYCLEYFPSQMLRTGNNFQFTYTFEDVPFHSSYAHSQSLDRLMNPLIDQYLYYLSRTQTTGGTANTQTLGFSQGGPNTMANQAKNWLPGPCYRQQRVSTMSAASGSGNFAWTAGTKYHLNGRNSLANPGIAMATHKDDEERFFPSNGILIFGKQNAARDNADYSDVMLTSEEEIKTTNPVATEEYGIVADNVMEPTRAPQIGTVNSQGALPGMVWQNRDVYLQGPIWAKIPHTDGNFHPSPLMGGFGLKHPPPQILIKNTPVPADPRSTFNGDKLNSFITQYSTGQVSVEIEWELQKENSKRWNPEIQYTSNYYKSTSVDFAVNTEGVYSEPRPIGTRYLTRNL

SEQ ID NO: 376 - protein, 737 aa, Artificial Sequence
  AAV capsid variant
MAADGYLPDWLEDNLSEGIREWWALKPGAPQPKANQQHQDNARGLVLPGYKYLGPGNGLDKGEPVNAADAAALEHDKAYDQQLKAGDNPYLKYNHADAEFQERLKEDTSFGGNLGRAVFQAKKRLLEPLGLVEEAAKTAPGKKRPVEQSPQEPDSSAGIGKSGAQPAKKRLNFGQTGDSESVPDPQPLGEPPAAPSGVGPNTMAAGGGAPMADNNEGADGVGSSSGNWHCDSTWLGDRVITTSTRTWALPTYNNHLYKQISNGTSGGATNDNTYFGYSTPWGYFDFNRFHCHFSPRDWQRLINNNWGFRPKRLSFKLFNIQVKEVTQNEGTKTIANNLTSTIQVFTDSEYQLPYVLGSAHQGCLPPFPADVFMIPQYGYLTLNNGSQAVGRSSFYCLEYFPSQMLRTGNNFQFTYTFEDVPFHSSYAHSQSLDRLMNPLIDQYLYYLSRTQTTGGTANTQTLGFSQGGPNTMANQAKNWLPGPCYRQQRVSTGTNLGKEQNFAWTAGTKYHLNGRNSLANPGIAMATHKDDEERFFPSNGILIFGKQNAARDNADYSDVMLTSEEEIKTTNPVATEEYGIVADNVMEPTRAPQIGTVNSQGALPGMVWQNRDVYLQGPIWAKIPHTDGNFHPSPLMGGFGLKHPPPQILIKNTPVPADPRSTFNGDKLNSFITQYSTGQVSVEIEWELQKENSKRWNPEIQYTSNYYKSTSVDFAVNTEGVYSEPRPIGTRYLTRNL

SEQ ID NO: 377 - protein, 737 aa, Artificial Sequence
  AAV capsid variant
MAADGYLPDWLEDNLSEGIREWWALKPGAPQPKANQQHQDNARGLVLPGYKYLGPGNGLDKGEPVNAADAAALEHDKAYDQQLKAGDNPYLKYNHADAEFQERLKEDTSFGGNLGRAVFQAKKRLLEPLGLVEEAAKTAPGKKRPVEQSPQEPDSSAGIGKSGAQPAKKRLNFGQTGDSESVPDPQPLGEPPAAPSGVGPNTMAAGGGAPMADNNEGADGVGSSSGNWHCDSTWLGDRVITTSTRTWALPTYNNHLYKQISNGTSGGATNDNTYFGYSTPWGYFDFNRFHCHFSPRDWQRLINNNWGFRPKRLSFKLFNIQVKEVTQNEGTKTIANNLTSTIQVFTDSEYQLPYVLGSAHQGCLPPFPADVFMIPQYGYLTLNNGSQAVGRSSFYCLEYFPSQMLRTGNNFQFTYTFEDVPFHSSYAHSQSLDRLMNPLIDQYLYYLSRTQTTGGTANTQTLGFSQGGPNTMANQAKNWLPGPCYRQQRVSTSSHSGTNQNFAWTAGTKYHLNGRNSLANPGIAMATHKDDEERFFPSNGILIFGKQNAARDNADYSDVMLTSEEEIKTTNPVATEEYGIVADNVMEPTRAPQIGTVNSQGALPGMVWQNRDVYLQGPIWAKIPHTDGNFHPSPLMGGFGLKHPPPQILIKNTPVPADPRSTFNGDKLNSFITQYSTGQVSVEIEWELQKENSKRWNPEIQYTSNYYKSTSVDFAVNTEGVYSEPRPIGTRYLTRNL

SEQ ID NO: 378 - protein, 737 aa, Artificial Sequence
  AAV capsid variant
MAADGYLPDWLEDNLSEGIREWWALKPGAPQPKANQQHQDNARGLVLPGYKYLGPGNGLDKGEPVNAADAAALEHDKAYDQQLKAGDNPYLKYNHADAEFQERLKEDTSFGGNLGRAVFQAKKRLLEPLGLVEEAAKTAPGKKRPVEQSPQEPDSSAGIGKSGAQPAKKRLNFGQTGDSESVPDPQPLGEPPAAPSGVGPNTMAAGGGAPMADNNEGADGVGSSSGNWHCDSTWLGDRVITTSTRTWALPTYNNHLYKQISNGTSGGATNDNTYFGYSTPWGYFDFNRFHCHFSPRDWQRLINNNWGFRPKRLSFKLFNIQVKEVTQNEGTKTIANNLTSTIQVFTDSEYQLPYVLGSAHQGCLPPFPADVFMIPQYGYLTLNNGSQAVGRSSFYCLEYFPSQMLRTGNNFQFTYTFEDVPFHSSYAHSQSLDRLMNPLIDQYLYYLSRTQTTGGTANTQTLGFSQGGPNTMANQAKNWLPGPCYRQQRVSTVATRDGQLNFAWTAGTKYHLNGRNSLANPGIAMATHKDDEERFFPSNGILIFGKQNAARDNADYSDVMLTSEEEIKTTNPVATEEYGIVADNVMEPTRAPQIGTVNSQGALPGMVWQNRDVYLQGPIWAKIPHTDGNFHPSPLMGGFGLKHPPPQILIKNTPVPADPRSTFNGDKLNSFITQYSTGQVSVEIEWELQKENSKRWNPEIQYTSNYYKSTSVDFAVNTEGVYSEPRPIGTRYLTRNL

SEQ ID NO: 379 - protein, 737 aa, Artificial Sequence
  AAV capsid variant
MAADGYLPDWLEDNLSEGIREWWALKPGAPQPKANQQHQDNARGLVLPGYKYLGPGNGLDKGEPVNAADAAALEHDKAYDQQLKAGDNPYLKYNHADAEFQERLKEDTSFGGNLGRAVFQAKKRLLEPLGLVEEAAKTAPGKKRPVEQSPQEPDSSAGIGKSGAQPAKKRLNFGQTGDSESVPDPQPLGEPPAAPSGVGPNTMAAGGGAPMADNNEGADGVGSSSGNWHCDSTWLGDRVITTSTRTWALPTYNNHLYKQISNGTSGGATNDNTYFGYSTPWGYFDFNRFHCHFSPRDWQRLINNNWGFRPKRLSFKLFNIQVKEVTQNEGTKTIANNLTSTIQVFTDSEYQLPYVLGSAHQGCLPPFPADVFMIPQYGYLTLNNGSQAVGRSSFYCLEYFPSQMLRTGNNFQFTYTFEDVPFHSSYAHSQSLDRLMNPLIDQYLYYLSRTQTTGGTANTQTLGFSQGGPNTMANQAKNWLPGPCYRQQRVSTALNADTGTNFAWTAGTKYHLNGRNSLANPGIAMATHKDDEERFFPSNGILIFGKQNAARDNADYSDVMLTSEEEIKTTNPVATEEYGIVADNVMEPTRAPQIGTVNSQGALPGMVWQNRDVYLQGPIWAKIPHTDGNFHPSPLMGGFGLKHPPPQILIKNTPVPADPRSTFNGDKLNSFITQYSTGQVSVEIEWELQKENSKRWNPEIQYTSNYYKSTSVDFAVNTEGVYSEPRPIGTRYLTRNL

SEQ ID NO: 380 - protein, 736 aa, Artificial Sequence
  AAV capsid variant
MAADGYLPDWLEDNLSEGIREWWALKPGAPQPKANQQHQDNARGLVLPGYKYLGPGNGLDKGEPVNAADAAALEHDKAYDQQLKAGDNPYLKYNHADAEFQERLKEDTSFGGNLGRAVFQAKKRLLEPLGLVEEAAKTAPGKKRPVEQSPQEPDSSAGIGKSGAQPAKKRLNFGQTGDSESVPDPQPLGEPPAAPSGVGPNTMAAGGGAPMADNNEGADGVGSSSGNWHCDSTWLGDRVITTSTRTWALPTYNNHLYKQISNGTSGGATNDNTYFGYSTPWGYFDFNRFHCHFSPRDWQRLINNNWGFRPKRLSFKLFNIQVKEVTQNEGTKTIANNLTSTIQVFTDSEYQLPYVLGSAHQGCLPPFPADVFMIPQYGYLTLNNGSQAVGRSSFYCLEYFPSQMLRTGNNFQFTYTFEDVPFHSSYAHSQSLDRLMNPLIDQYLYYLSRTQTTSNGRGVTLGFSQGGPNTMANQAKNWLPGPCYRQQRVSTNLAENFKYNFAWTAGTKYHLNGRNSLANPGIAMATHKDDEERFFPSNGILIFGKQNAARDNADYSDVMLTSEEEIKTTNPVATEEYGIVADNVMEPTRAPQIGTVNSQGALPGMVWQNRDVYLQGPIWAKIPHTDGNFHPSPLMGGFGLKHPPPQILIKNTPVPADPRSTFNGDKLNSFITQYSTGQVSVEIEWELQKENSKRWNPEIQYTSNYYKSTSVDFAVNTEGVYSEPRPIGTRYLTRNL

SEQ ID NO: 381 - protein, 736 aa, Artificial Sequence
  AAV capsid variant
MAADGYLPDWLEDNLSEGIREWWALKPGAPQPKANQQHQDNARGLVLPGYKYLGPGNGLDKGEPVNAADAAALEHDKAYDQQLKAGDNPYLKYNHADAEFQERLKEDTSFGGNLGRAVFQAKKRLLEPLGLVEEAAKTAPGKKRPVEQSPQEPDSSAGIGKSGAQPAKKRLNFGQTGDSESVPDPQPLGEPPAAPSGVGPNTMAAGGGAPMADNNEGADGVGSSSGNWHCDSTWLGDRVITTSTRTWALPTYNNHLYKQISNGTSGGATNDNTYFGYSTPWGYFDFNRFHCHFSPRDWQRLINNNWGFRPKRLSFKLFNIQVKEVTQNEGTKTIANNLTSTIQVFTDSEYQLPYVLGSAHQGCLPPFPADVFMIPQYGYLTLNNGSQAVGRSSFYCLEYFPSQMLRTGNNFQFTYTFEDVPFHSSYAHSQSLDRLMNPLIDQYLYYLSRTQTTSNGRGVTLGFSQGGPNTMANQAKNWLPGPCYRQQRVSTVLSGDHSANFAWTAGTKYHLNGRNSLANPGIAMATHKDDEERFFPSNGILIFGKQNAARDNADYSDVMLTSEEEIKTTNPVATEEYGIVADNVMEPTRAPQIGTVNSQGALPGMVWQNRDVYLQGPIWAKIPHTDGNFHPSPLMGGFGLKHPPPQILIKNTPVPADPRSTFNGDKLNSFITQYSTGQVSVEIEWELQKENSKRWNPEIQYTSNYYKSTSVDFAVNTEGVYSEPRPIGTRYLTRNL

SEQ ID NO: 382 - protein, 736 aa, Artificial Sequence
  AAV capsid variant
MAADGYLPDWLEDNLSEGIREWWALKPGAPQPKANQQHQDNARGLVLPGYKYLGPGNGLDKGEPVNAADAAALEHDKAYDQQLKAGDNPYLKYNHADAEFQERLKEDTSFGGNLGRAVFQAKKRLLEPLGLVEEAAKTAPGKKRPVEQSPQEPDSSAGIGKSGAQPAKKRLNFGQTGDSESVPDPQPLGEPPAAPSGVGPNTMAAGGGAPMADNNEGADGVGSSSGNWHCDSTWLGDRVITTSTRTWALPTYNNHLYKQISNGTSGGATNDNTYFGYSTPWGYFDFNRFHCHFSPRDWQRLINNNWGFRPKRLSFKLFNIQVKEVTQNEGTKTIANNLTSTIQVFTDSEYQLPYVLGSAHQGCLPPFPADVFMIPQYGYLTLNNGSQAVGRSSFYCLEYFPSQMLRTGNNFQFTYTFEDVPFHSSYAHSQSLDRLMNPLIDQYLYYLSRTQTTSNGRGVTLGFSQGGPNTMANQAKNWLPGPCYRQQRVSTMSAASGSGNFAWTAGTKYHLNGRNSLANPGIAMATHKDDEERFFPSNGILIFGKQNAARDNADYSDVMLTSEEEIKTTNPVATEEYGIVADNVMEPTRAPQIGTVNSQGALPGMVWQNRDVYLQGPIWAKIPHTDGNFHPSPLMGGFGLKHPPPQILIKNTPVPADPRSTFNGDKLNSFITQYSTGQVSVEIEWELQKENSKRWNPEIQYTSNYYKSTSVDFAVNTEGVYSEPRPIGTRYLTRNL

SEQ ID NO: 383 - protein, 736 aa, Artificial Sequence
  AAV capsid variant
MAADGYLPDWLEDNLSEGIREWWALKPGAPQPKANQQHQDNARGLVLPGYKYLGPGNGLDKGEPVNAADAAALEHDKAYDQQLKAGDNPYLKYNHADAEFQERLKEDTSFGGNLGRAVFQAKKRLLEPLGLVEEAAKTAPGKKRPVEQSPQEPDSSAGIGKSGAQPAKKRLNFGQTGDSESVPDPQPLGEPPAAPSGVGPNTMAAGGGAPMADNNEGADGVGSSSGNWHCDSTWLGDRVITTSTRTWALPTYNNHLYKQISNGTSGGATNDNTYFGYSTPWGYFDFNRFHCHFSPRDWQRLINNNWGFRPKRLSFKLFNIQVKEVTQNEGTKTIANNLTSTIQVFTDSEYQLPYVLGSAHQGCLPPFPADVFMIPQYGYLTLNNGSQAVGRSSFYCLEYFPSQMLRTGNNFQFTYTFEDVPFHSSYAHSQSLDRLMNPLIDQYLYYLSRTQTTSNGRGVTLGFSQGGPNTMANQAKNWLPGPCYRQQRVSTGTNLGKEQNFAWTAGTKYHLNGRNSLANPGIAMATHKDDEERFFPSNGILIFGKQNAARDNADYSDVMLTSEEEIKTTNPVATEEYGIVADNVMEPTRAPQIGTVNSQGALPGMVWQNRDVYLQGPIWAKIPHTDGNFHPSPLMGGFGLKHPPPQILIKNTPVPADPRSTFNGDKLNSFITQYSTGQVSVEIEWELQKENSKRWNPEIQYTSNYYKSTSVDFAVNTEGVYSEPRPIGTRYLTRNL

SEQ ID NO: 384 - protein, 736 aa, Artificial Sequence
  AAV capsid variant
MAADGYLPDWLEDNLSEGIREWWALKPGAPQPKANQQHQDNARGLVLPGYKYLGPGNGLDKGEPVNAADAAALEHDKAYDQQLKAGDNPYLKYNHADAEFQERLKEDTSFGGNLGRAVFQAKKRLLEPLGLVEEAAKTAPGKKRPVEQSPQEPDSSAGIGKSGAQPAKKRLNFGQTGDSESVPDPQPLGEPPAAPSGVGPNTMAAGGGAPMADNNEGADGVGSSSGNWHCDSTWLGDRVITTSTRTWALPTYNNHLYKQISNGTSGGATNDNTYFGYSTPWGYFDFNRFHCHFSPRDWQRLINNNWGFRPKRLSFKLFNIQVKEVTQNEGTKTIANNLTSTIQVFTDSEYQLPYVLGSAHQGCLPPFPADVFMIPQYGYLTLNNGSQAVGRSSFYCLEYFPSQMLRTGNNFQFTYTFEDVPFHSSYAHSQSLDRLMNPLIDQYLYYLSRTQTTSNGRGVTLGFSQGGPNTMANQAKNWLPGPCYRQQRVSTSSHSGTNQNFAWTAGTKYHLNGRNSLANPGIAMATHKDDEERFFPSNGILIFGKQNAARDNADYSDVMLTSEEEIKTTNPVATEEYGIVADNVMEPTRAPQIGTVNSQGALPGMVWQNRDVYLQGPIWAKIPHTDGNFHPSPLMGGFGLKHPPPQILIKNTPVPADPRSTFNGDKLNSFITQYSTGQVSVEIEWELQKENSKRWNPEIQYTSNYYKSTSVDFAVNTEGVYSEPRPIGTRYLTRNL

SEQ ID NO: 385 - protein, 736 aa, Artificial Sequence
  AAV capsid variant
MAADGYLPDWLEDNLSEGIREWWALKPGAPQPKANQQHQDNARGLVLPGYKYLGPGNGLDKGEPVNAADAAALEHDKAYDQQLKAGDNPYLKYNHADAEFQERLKEDTSFGGNLGRAVFQAKKRLLEPLGLVEEAAKTAPGKKRPVEQSPQEPDSSAGIGKSGAQPAKKRLNFGQTGDSESVPDPQPLGEPPAAPSGVGPNTMAAGGGAPMADNNEGADGVGSSSGNWHCDSTWLGDRVITTSTRTWALPTYNNHLYKQISNGTSGGATNDNTYFGYSTPWGYFDFNRFHCHFSPRDWQRLINNNWGFRPKRLSFKLFNIQVKEVTQNEGTKTIANNLTSTIQVFTDSEYQLPYVLGSAHQGCLPPFPADVFMIPQYGYLTLNNGSQAVGRSSFYCLEYFPSQMLRTGNNFQFTYTFEDVPFHSSYAHSQSLDRLMNPLIDQYLYYLSRTQTTSNGRGVTLGFSQGGPNTMANQAKNWLPGPCYRQQRVSTVATRDGQLNFAWTAGTKYHLNGRNSLANPGIAMATHKDDEERFFPSNGILIFGKQNAARDNADYSDVMLTSEEEIKTTNPVATEEYGIVADNVMEPTRAPQIGTVNSQGALPGMVWQNRDVYLQGPIWAKIPHTDGNFHPSPLMGGFGLKHPPPQILIKNTPVPADPRSTFNGDKLNSFITQYSTGQVSVEIEWELQKENSKRWNPEIQYTSNYYKSTSVDFAVNTEGVYSEPRPIGTRYLTRNL

SEQ ID NO: 386 - protein, 736 aa, Artificial Sequence
  AAV capsid variant
MAADGYLPDWLEDNLSEGIREWWALKPGAPQPKANQQHQDNARGLVLPGYKYLGPGNGLDKGEPVNAADAAALEHDKAYDQQLKAGDNPYLKYNHADAEFQERLKEDTSFGGNLGRAVFQAKKRLLEPLGLVEEAAKTAPGKKRPVEQSPQEPDSSAGIGKSGAQPAKKRLNFGQTGDSESVPDPQPLGEPPAAPSGVGPNTMAAGGGAPMADNNEGADGVGSSSGNWHCDSTWLGDRVITTSTRTWALPTYNNHLYKQISNGTSGGATNDNTYFGYSTPWGYFDFNRFHCHFSPRDWQRLINNNWGFRPKRLSFKLFNIQVKEVTQNEGTKTIANNLTSTIQVFTDSEYQLPYVLGSAHQGCLPPFPADVFMIPQYGYLTLNNGSQAVGRSSFYCLEYFPSQMLRTGNNFQFTYTFEDVPFHSSYAHSQSLDRLMNPLIDQYLYYLSRTQTTSNGRGVTLGFSQGGPNTMANQAKNWLPGPCYRQQRVSTALNADTGTNFAWTAGTKYHLNGRNSLANPGIAMATHKDDEERFFPSNGILIFGKQNAARDNADYSDVMLTSEEEIKTTNPVATEEYGIVADNVMEPTRAPQIGTVNSQGALPGMVWQNRDVYLQGPIWAKIPHTDGNFHPSPLMGGFGLKHPPPQILIKNTPVPADPRSTFNGDKLNSFITQYSTGQVSVEIEWELQKENSKRWNPEIQYTSNYYKSTSVDFAVNTEGVYSEPRPIGTRYLTRNL

SEQ ID NO: 387 - protein, 738 aa, Artificial Sequence
  AAV capsid variant
MAADGYLPDWLEDNLSEGIREWWALKPGAPKPKANQQKQDDGRGLVLPGYKYLGPFNGLDKGEPVNAADAAALEHDKAYDQQLQAGDNPYLRYNHADAEFQERLQEDTSFGGNLGRAVFQAKKRVLEPLGLVEEGAKTAPGKKRPVEPSPQRSPDSSTGIGKKGQQPARKRLNFGQTGDSESVPDPQPLGEPPAAPSGVGPNTMAAGGGAPMADNNEGADGVGSSSGNWHCDSTWLGDRVITTSTRTWALPTYNNHLYKQISNGTSGGATNDNTYFGYSTPWGYFDFNRFHCHFSPRDWQRLINNNWGFRPKRLSFKLFNIQVKEVTQNEGTKTIANNLTSTIQVFTDSEYQLPYVLGSAHQGCLPPFPADVFMIPQYGYLTLNNGSQAVGRSSFYCLEYFPSQMLRTGNNFQFTYTFEDVPFHSSYAHSQSLDRLMNPLIDQYLYYLSRTQTTGGTANTQTLGFSQGGPNTMANQAKNWLPGPCYRQQRVSTVVGNGGVVNFAWTAGTKYHLNGRNSLANPGIAMATHKDDEERFFPSNGILIFGKQNAARDNADYSDVMLTSEEEIKTTNPVATEEYGIVADNLQQQNTAPQIGTVNSQGALPGMVWQNRDVYLQGPIWAKIPHTDGNFHPSPLMGGFGLKHPPPQILIKNTPVPADPRSTFNGDKLNSFITQYSTGQVSVEIEWELQKENSKRWNPEIQYTSNYYKSTSVDFAVNTEGVYSEPRPIGTRYLTRNL

SEQ ID NO: 388 - protein, 738 aa, Artificial Sequence
  AAV capsid variant
MAADGYLPDWLEDNLSEGIREWWALKPGAPKPKANQQKQDDGRGLVLPGYKYLGPFNGLDKGEPVNAADAAALEHDKAYDQQLQAGDNPYLRYNHADAEFQERLQEDTSFGGNLGRAVFQAKKRVLEPLGLVEEGAKTAPGKKRPVEPSPQRSPDSSTGIGKKGQQPARKRLNFGQTGDSESVPDPQPLGEPPAAPSGVGPNTMAAGGGAPMADNNEGADGVGSSSGNWHCDSTWLGDRVITTSTRTWALPTYNNHLYKQISNGTSGGATNDNTYFGYSTPWGYFDFNRFHCHFSPRDWQRLINNNWGFRPKRLSFKLFNIQVKEVTQNEGTKTIANNLTSTIQVFTDSEYQLPYVLGSAHQGCLPPFPADVFMIPQYGYLTLNNGSQAVGRSSFYCLEYFPSQMLRTGNNFQFTYTFEDVPFHSSYAHSQSLDRLMNPLIDQYLYYLSRTQTTGGTANTQTLGFSQGGPNTMANQAKNWLPGPCYRQQRVSTNFREMPIGNFAWTAGTKYHLNGRNSLANPGIAMATHKDDEERFFPSNGILIFGKQNAARDNADYSDVMLTSEEEIKTTNPVATEEYGIVADNLQQQNTAPQIGTVNSQGALPGMVWQNRDVYLQGPIWAKIPHTDGNFHPSPLMGGFGLKHPPPQILIKNTPVPADPRSTFNGDKLNSFITQYSTGQVSVEIEWELQKENSKRWNPEIQYTSNYYKSTSVDFAVNTEGVYSEPRPIGTRYLTRNL

SEQ ID NO: 389 - protein, 739 aa, Artificial Sequence
  AAV capsid variant
MAADGYLPDWLEDNLSEGIREWWALKPGAPKPKANQQKQDDGRGLVLPGYKYLGPFNGLDKGEPVNAADAAALEHDKAYDQQLQAGDNPYLRYNHADAEFQERLQEDTSFGGNLGRAVFQAKKRVLEPLGLVEEGAKTAPGKKRPVEPSPQRSPDSSTGIGKKGQQPARKRLNFGQTGDSESVPDPQPLGEPPAAPSGVGPNTMAAGGGAPMADNNEGADGVGSSSGNWHCDSTWLGDRVITTSTRTWALPTYNNHLYKQISNGTSGGATNDNTYFGYSTPWGYFDFNRFHCHFSPRDWQRLINNNWGFRPKRLSFKLFNIQVKEVTQNEGTKTIANNLTSTIQVFTDSEYQLPYVLGSAHQGCLPPFPADVFMIPQYGYLTLNNGSQAVGRSSFYCLEYFPSQMLRTGNNFQFTYTFEDVPFHSSYAHSQSLDRLMNPLIDQYLYYLSRTQTTGGTANTQTLGFSQGGPNTMANQAKNWLPGPCYRQQRVSTRRSEDMGTINFAWTAGTKYHLNGRNSLANPGIAMATHKDDEERFFPSNGILIFGKQNAARDNADYSDVMLTSEEEIKTTNPVATEEYGIVADNLQQQNTAPQIGTVNSQGALPGMVWQNRDVYLQGPIWAKIPHTDGNFHPSPLMGGFGLKHPPPQILIKNTPVPADPRSTFNGDKLNSFITQYSTGQVSVEIEWELQKENSKRWNPEIQYTSNYYKSTSVDFAVNTEGVYSEPRPIGTRYLTRNL

SEQ ID NO: 390 - protein, 737 aa, Artificial Sequence
  AAV capsid variant
MAADGYLPDWLEDNLSEGIREWWALKPGAPKPKANQQKQDDGRGLVLPGYKYLGPFNGLDKGEPVNAADAAALEHDKAYDQQLQAGDNPYLRYNHADAEFQERLQEDTSFGGNLGRAVFQAKKRVLEPLGLVEEGAKTAPGKKRPVEPSPQRSPDSSTGIGKKGQQPARKRLNFGQTGDSESVPDPQPLGEPPAAPSGVGPNTMAAGGGAPMADNNEGADGVGSSSGNWHCDSTWLGDRVITTSTRTWALPTYNNHLYKQISNGTSGGATNDNTYFGYSTPWGYFDFNRFHCHFSPRDWQRLINNNWGFRPKRLSFKLFNIQVKEVTQNEGTKTIANNLTSTIQVFTDSEYQLPYVLGSAHQGCLPPFPADVFMIPQYGYLTLNNGSQAVGRSSFYCLEYFPSQMLRTGNNFQFTYTFEDVPFHSSYAHSQSLDRLMNPLIDQYLYYLSRTQTTSNGRGVTLGFSQGGPNTMANQAKNWLPGPCYRQQRVSTVVGNGGVVNFAWTAGTKYHLNGRNSLANPGIAMATHKDDEERFFPSNGILIFGKQNAARDNADYSDVMLTSEEEIKTTNPVATEEYGIVADNLQQQNTAPQIGTVNSQGALPGMVWQNRDVYLQGPIWAKIPHTDGNFHPSPLMGGFGLKHPPPQILIKNTPVPADPRSTFNGDKLNSFITQYSTGQVSVEIEWELQKENSKRWNPEIQYTSNYYKSTSVDFAVNTEGVYSEPRPIGTRYLTRNL

SEQ ID NO: 391 - protein, 737 aa, Artificial Sequence
  AAV capsid variant
MAADGYLPDWLEDNLSEGIREWWALKPGAPKPKANQQKQDDGRGLVLPGYKYLGPFNGLDKGEPVNAADAAALEHDKAYDQQLQAGDNPYLRYNHADAEFQERLQEDTSFGGNLGRAVFQAKKRVLEPLGLVEEGAKTAPGKKRPVEPSPQRSPDSSTGIGKKGQQPARKRLNFGQTGDSESVPDPQPLGEPPAAPSGVGPNTMAAGGGAPMADNNEGADGVGSSSGNWHCDSTWLGDRVITTSTRTWALPTYNNHLYKQISNGTSGGATNDNTYFGYSTPWGYFDFNRFHCHFSPRDWQRLINNNWGFRPKRLSFKLFNIQVKEVTQNEGTKTIANNLTSTIQVFTDSEYQLPYVLGSAHQGCLPPFPADVFMIPQYGYLTLNNGSQAVGRSSFYCLEYFPSQMLRTGNNFQFTYTFEDVPFHSSYAHSQSLDRLMNPLIDQYLYYLSRTQTTSNGRGVTLGFSQGGPNTMANQAKNWLPGPCYRQQRVSTNFREMPIGNFAWTAGTKYHLNGRNSLANPGIAMATHKDDEERFFPSNGILIFGKQNAARDNADYSDVMLTSEEEIKTTNPVATEEYGIVADNLQQQNTAPQIGTVNSQGALPGMVWQNRDVYLQGPIWAKIPHTDGNFHPSPLMGGFGLKHPPPQILIKNTPVPADPRSTFNGDKLNSFITQYSTGQVSVEIEWELQKENSKRWNPEIQYTSNYYKSTSVDFAVNTEGVYSEPRPIGTRYLTRNL

SEQ ID NO: 392 - protein, 738 aa, Artificial Sequence
  AAV capsid variant
MAADGYLPDWLEDNLSEGIREWWALKPGAPKPKANQQKQDDGRGLVLPGYKYLGPFNGLDKGEPVNAADAAALEHDKAYDQQLQAGDNPYLRYNHADAEFQERLQEDTSFGGNLGRAVFQAKKRVLEPLGLVEEGAKTAPGKKRPVEPSPQRSPDSSTGIGKKGQQPARKRLNFGQTGDSESVPDPQPLGEPPAAPSGVGPNTMAAGGGAPMADNNEGADGVGSSSGNWHCDSTWLGDRVITTSTRTWALPTYNNHLYKQISNGTSGGATNDNTYFGYSTPWGYFDFNRFHCHFSPRDWQRLINNNWGFRPKRLSFKLFNIQVKEVTQNEGTKTIANNLTSTIQVFTDSEYQLPYVLGSAHQGCLPPFPADVFMIPQYGYLTLNNGSQAVGRSSFYCLEYFPSQMLRTGNNFQFTYTFEDVPFHSSYAHSQSLDRLMNPLIDQYLYYLSRTQTTSNGRGVTLGFSQGGPNTMANQAKNWLPGPCYRQQRVSTRRSEDMGTINFAWTAGTKYHLNGRNSLANPGIAMATHKDDEERFFPSNGILIFGKQNAARDNADYSDVMLTSEEEIKTTNPVATEEYGIVADNLQQQNTAPQIGTVNSQGALPGMVWQNRDVYLQGPIWAKIPHTDGNFHPSPLMGGFGLKHPPPQILIKNTPVPADPRSTFNGDKLNSFITQYSTGQVSVEIEWELQKENSKRWNPEIQYTSNYYKSTSVDFAVNTEGVYSEPRPIGTRYLTRNL

SEQ ID NO: 393 - protein, 738 aa, Artificial Sequence
  AAV capsid variant
MAADGYLPDWLEDNLSEGIREWWALKPGAPKPKANQQKQDDGRGLVLPGYKYLGPFNGLDKGEPVNAADAAALEHDKAYDQQLQAGDNPYLRYNHADAEFQERLQEDTSFGGNLGRAVFQAKKRVLEPLGLVEEGAKTAPGKKRPVEPSPQRSPDSSTGIGKKGQQPARKRLNFGQTGDSESVPDPQPLGEPPAAPSGVGPNTMAAGGGAPMADNNEGADGVGSSSGNWHCDSTWLGDRVITTSTRTWALPTYNNHLYKQISNGTSGGATNDNTYFGYSTPWGYFDFNRFHCHFSPRDWQRLINNNWGFRPKRLSFKLFNIQVKEVTQNEGTKTIANNLTSTIQVFTDSEYQLPYVLGSAHQGCLPPFPADVFMIPQYGYLTLNNGSQAVGRSSFYCLEYFPSQMLRTGNNFQFTYTFEDVPFHSSYAHSQSLDRLMNPLIDQYLYYLSRTQTTGGTANTQTLGFSQGGPNTMANQAKNWLPGPCYRQQRVSTVVGNGGVVNFAWTAGTKYHLNGRNSLANPGIAMATHKDDEERFFPSNGILIFGKQNAARDNADYSDVMLTSEEEIKTTNPVATEEYGIVADNVMEPTRAPQIGTVNSQGALPGMVWQNRDVYLQGPIWAKIPHTDGNFHPSPLMGGFGLKHPPPQILIKNTPVPADPRSTFNGDKLNSFITQYSTGQVSVEIEWELQKENSKRWNPEIQYTSNYYKSTSVDFAVNTEGVYSEPRPIGTRYLTRNL

SEQ ID NO: 394 - protein, 738 aa, Artificial Sequence
  AAV capsid variant
MAADGYLPDWLEDNLSEGIREWWALKPGAPKPKANQQKQDDGRGLVLPGYKYLGPFNGLDKGEPVNAADAAALEHDKAYDQQLQAGDNPYLRYNHADAEFQERLQEDTSFGGNLGRAVFQAKKRVLEPLGLVEEGAKTAPGKKRPVEPSPQRSPDSSTGIGKKGQQPARKRLNFGQTGDSESVPDPQPLGEPPAAPSGVGPNTMAAGGGAPMADNNEGADGVGSSSGNWHCDSTWLGDRVITTSTRTWALPTYNNHLYKQISNGTSGGATNDNTYFGYSTPWGYFDFNRFHCHFSPRDWQRLINNNWGFRPKRLSFKLFNIQVKEVTQNEGTKTIANNLTSTIQVFTDSEYQLPYVLGSAHQGCLPPFPADVFMIPQYGYLTLNNGSQAVGRSSFYCLEYFPSQMLRTGNNFQFTYTFEDVPFHSSYAHSQSLDRLMNPLIDQYLYYLSRTQTTGGTANTQTLGFSQGGPNTMANQAKNWLPGPCYRQQRVSTNFREMPIGNFAWTAGTKYHLNGRNSLANPGIAMATHKDDEERFFPSNGILIFGKQNAARDNADYSDVMLTSEEEIKTTNPVATEEYGIVADNVMEPTRAPQIGTVNSQGALPGMVWQNRDVYLQGPIWAKIPHTDGNFHPSPLMGGFGLKHPPPQILIKNTPVPADPRSTFNGDKLNSFITQYSTGQVSVEIEWELQKENSKRWNPEIQYTSNYYKSTSVDFAVNTEGVYSEPRPIGTRYLTRNL

SEQ ID NO: 395 - protein, 739 aa, Artificial Sequence
  AAV capsid variant
MAADGYLPDWLEDNLSEGIREWWALKPGAPKPKANQQKQDDGRGLVLPGYKYLGPFNGLDKGEPVNAADAAALEHDKAYDQQLQAGDNPYLRYNHADAEFQERLQEDTSFGGNLGRAVFQAKKRVLEPLGLVEEGAKTAPGKKRPVEPSPQRSPDSSTGIGKKGQQPARKRLNFGQTGDSESVPDPQPLGEPPAAPSGVGPNTMAAGGGAPMADNNEGADGVGSSSGNWHCDSTWLGDRVITTSTRTWALPTYNNHLYKQISNGTSGGATNDNTYFGYSTPWGYFDFNRFHCHFSPRDWQRLINNNWGFRPKRLSFKLFNIQVKEVTQNEGTKTIANNLTSTIQVFTDSEYQLPYVLGSAHQGCLPPFPADVFMIPQYGYLTLNNGSQAVGRSSFYCLEYFPSQMLRTGNNFQFTYTFEDVPFHSSYAHSQSLDRLMNPLIDQYLYYLSRTQTTGGTANTQTLGFSQGGPNTMANQAKNWLPGPCYRQQRVSTRRSEDMGTINFAWTAGTKYHLNGRNSLANPGIAMATHKDDEERFFPSNGILIFGKQNAARDNADYSDVMLTSEEEIKTTNPVATEEYGIVADNVMEPTRAPQIGTVNSQGALPGMVWQNRDVYLQGPIWAKIPHTDGNFHPSPLMGGFGLKHPPPQILIKNTPVPADPRSTFNGDKLNSFITQYSTGQVSVEIEWELQKENSKRWNPEIQYTSNYYKSTSVDFAVNTEGVYSEPRPIGTRYLTRNL

SEQ ID NO: 396 - protein, 737 aa, Artificial Sequence
  AAV capsid variant
MAADGYLPDWLEDNLSEGIREWWALKPGAPKPKANQQKQDDGRGLVLPGYKYLGPFNGLDKGEPVNAADAAALEHDKAYDQQLQAGDNPYLRYNHADAEFQERLQEDTSFGGNLGRAVFQAKKRVLEPLGLVEEGAKTAPGKKRPVEPSPQRSPDSSTGIGKKGQQPARKRLNFGQTGDSESVPDPQPLGEPPAAPSGVGPNTMAAGGGAPMADNNEGADGVGSSSGNWHCDSTWLGDRVITTSTRTWALPTYNNHLYKQISNGTSGGATNDNTYFGYSTPWGYFDFNRFHCHFSPRDWQRLINNNWGFRPKRLSFKLFNIQVKEVTQNEGTKTIANNLTSTIQVFTDSEYQLPYVLGSAHQGCLPPFPADVFMIPQYGYLTLNNGSQAVGRSSFYCLEYFPSQMLRTGNNFQFTYTFEDVPFHSSYAHSQSLDRLMNPLIDQYLYYLSRTQTTSNGRGVTLGFSQGGPNTMANQAKNWLPGPCYRQQRVSTVVGNGGVVNFAWTAGTKYHLNGRNSLANPGIAMATHKDDEERFFPSNGILIFGKQNAARDNADYSDVMLTSEEEIKTTNPVATEEYGIVADNVMEPTRAPQIGTVNSQGALPGMVWQNRDVYLQGPIWAKIPHTDGNFHPSPLMGGFGLKHPPPQILIKNTPVPADPRSTFNGDKLNSFITQYSTGQVSVEIEWELQKENSKRWNPEIQYTSNYYKSTSVDFAVNTEGVYSEPRPIGTRYLTRNL

SEQ ID NO: 397 - protein, 737 aa, Artificial Sequence
  AAV capsid variant
MAADGYLPDWLEDNLSEGIREWWALKPGAPKPKANQQKQDDGRGLVLPGYKYLGPFNGLDKGEPVNAADAAALEHDKAYDQQLQAGDNPYLRYNHADAEFQERLQEDTSFGGNLGRAVFQAKKRVLEPLGLVEEGAKTAPGKKRPVEPSPQRSPDSSTGIGKKGQQPARKRLNFGQTGDSESVPDPQPLGEPPAAPSGVGPNTMAAGGGAPMADNNEGADGVGSSSGNWHCDSTWLGDRVITTSTRTWALPTYNNHLYKQISNGTSGGATNDNTYFGYSTPWGYFDFNRFHCHFSPRDWQRLINNNWGFRPKRLSFKLFNIQVKEVTQNEGTKTIANNLTSTIQVFTDSEYQLPYVLGSAHQGCLPPFPADVFMIPQYGYLTLNNGSQAVGRSSFYCLEYFPSQMLRTGNNFQFTYTFEDVPFHSSYAHSQSLDRLMNPLIDQYLYYLSRTQTTSNGRGVTLGFSQGGPNTMANQAKNWLPGPCYRQQRVSTNFREMPIGNFAWTAGTKYHLNGRNSLANPGIAMATHKDDEERFFPSNGILIFGKQNAARDNADYSDVMLTSEEEIKTTNPVATEEYGIVADNVMEPTRAPQIGTVNSQGALPGMVWQNRDVYLQGPIWAKIPHTDGNFHPSPLMGGFGLKHPPPQILIKNTPVPADPRSTFNGDKLNSFITQYSTGQVSVEIEWELQKENSKRWNPEIQYTSNYYKSTSVDFAVNTEGVYSEPRPIGTRYLTRNL

SEQ ID NO: 398 - protein, 738 aa, Artificial Sequence
  AAV capsid variant
MAADGYLPDWLEDNLSEGIREWWALKPGAPKPKANQQKQDDGRGLVLPGYKYLGPFNGLDKGEPVNAADAAALEHDKAYDQQLQAGDNPYLRYNHADAEFQERLQEDTSFGGNLGRAVFQAKKRVLEPLGLVEEGAKTAPGKKRPVEPSPQRSPDSSTGIGKKGQQPARKRLNFGQTGDSESVPDPQPLGEPPAAPSGVGPNTMAAGGGAPMADNNEGADGVGSSSGNWHCDSTWLGDRVITTSTRTWALPTYNNHLYKQISNGTSGGATNDNTYFGYSTPWGYFDFNRFHCHFSPRDWQRLINNNWGFRPKRLSFKLFNIQVKEVTQNEGTKTIANNLTSTIQVFTDSEYQLPYVLGSAHQGCLPPFPADVFMIPQYGYLTLNNGSQAVGRSSFYCLEYFPSQMLRTGNNFQFTYTFEDVPFHSSYAHSQSLDRLMNPLIDQYLYYLSRTQTTSNGRGVTLGFSQGGPNTMANQAKNWLPGPCYRQQRVSTRRSEDMGTINFAWTAGTKYHLNGRNSLANPGIAMATHKDDEERFFPSNGILIFGKQNAARDNADYSDVMLTSEEEIKTTNPVATEEYGIVADNVMEPTRAPQIGTVNSQGALPGMVWQNRDVYLQGPIWAKIPHTDGNFHPSPLMGGFGLKHPPPQILIKNTPVPADPRSTFNGDKLNSFITQYSTGQVSVEIEWELQKENSKRWNPEIQYTSNYYKSTSVDFAVNTEGVYSEPRPIGTRYLTRNL

SEQ ID NO: 399 - protein, 737 aa, Artificial Sequence
  AAV capsid variant
MAADGYLPDWLEDNLSEGIREWWALKPGAPQPKANQQHQDNARGLVLPGYKYLGPGNGLDKGEPVNAADAAALEHDKAYDQQLKAGDNPYLKYNHADAEFQERLKEDTSFGGNLGRAVFQAKKRLLEPLGLVEEAAKTAPGKKRPVEQSPQEPDSSAGIGKSGAQPAKKRLNFGQTGDSESVPDPQPLGEPPAAPSGVGPNTMAAGGGAPMADNNEGADGVGSSSGNWHCDSTWLGDRVITTSTRTWALPTYNNHLYKQISNGTSGGATNDNTYFGYSTPWGYFDFNRFHCHFSPRDWQRLINNNWGFRPKRLSFKLFNIQVKEVTQNEGTKTIANNLTSTIQVFTDSEYQLPYVLGSAHQGCLPPFPADVFMIPQYGYLTLNNGSQAVGRSSFYCLEYFPSQMLRTGNNFQFTYTFEDVPFHSSYAHSQSLDRLMNPLIDQYLYYLSRTQTTGGTANTQTLGFSQGGPNTMANQAKNWLPGPCYRQQRVSTVVGNGGVVNFAWTAGTKYHLNGRNSLANPGIAMATHKDDEERFFPSNGILIFGKQNAARDNADYSDVMLTSEEEIKTTNPVATEEYGIVADNLQQQNTAPQIGTVNSQGALPGMVWQNRDVYLQGPIWAKIPHTDGNFHPSPLMGGFGLKHPPPQILIKNTPVPADPRSTFNGDKLNSFITQYSTGQVSVEIEWELQKENSKRWNPEIQYTSNYYKSTSVDFAVNTEGVYSEPRPIGTRYLTRNL

SEQ ID NO: 400 - protein, 737 aa, Artificial Sequence
  AAV capsid variant
MAADGYLPDWLEDNLSEGIREWWALKPGAPQPKANQQHQDNARGLVLPGYKYLGPGNGLDKGEPVNAADAAALEHDKAYDQQLKAGDNPYLKYNHADAEFQERLKEDTSFGGNLGRAVFQAKKRLLEPLGLVEEAAKTAPGKKRPVEQSPQEPDSSAGIGKSGAQPAKKRLNFGQTGDSESVPDPQPLGEPPAAPSGVGPNTMAAGGGAPMADNNEGADGVGSSSGNWHCDSTWLGDRVITTSTRTWALPTYNNHLYKQISNGTSGGATNDNTYFGYSTPWGYFDFNRFHCHFSPRDWQRLINNNWGFRPKRLSFKLFNIQVKEVTQNEGTKTIANNLTSTIQVFTDSEYQLPYVLGSAHQGCLPPFPADVFMIPQYGYLTLNNGSQAVGRSSFYCLEYFPSQMLRTGNNFQFTYTFEDVPFHSSYAHSQSLDRLMNPLIDQYLYYLSRTQTTGGTANTQTLGFSQGGPNTMANQAKNWLPGPCYRQQRVSTNFREMPIGNFAWTAGTKYHLNGRNSLANPGIAMATHKDDEERFFPSNGILIFGKQNAARDNADYSDVMLTSEEEIKTTNPVATEEYGIVADNLQQQNTAPQIGTVNSQGALPGMVWQNRDVYLQGPIWAKIPHTDGNFHPSPLMGGFGLKHPPPQILIKNTPVPADPRSTFNGDKLNSFITQYSTGQVSVEIEWELQKENSKRWNPEIQYTSNYYKSTSVDFAVNTEGVYSEPRPIGTRYLTRNL

SEQ ID NO: 401 - protein, 738 aa, Artificial Sequence
  AAV capsid variant
MAADGYLPDWLEDNLSEGIREWWALKPGAPQPKANQQHQDNARGLVLPGYKYLGPGNGLDKGEPVNAADAAALEHDKAYDQQLKAGDNPYLKYNHADAEFQERLKEDTSFGGNLGRAVFQAKKRLLEPLGLVEEAAKTAPGKKRPVEQSPQEPDSSAGIGKSGAQPAKKRLNFGQTGDSESVPDPQPLGEPPAAPSGVGPNTMAAGGGAPMADNNEGADGVGSSSGNWHCDSTWLGDRVITTSTRTWALPTYNNHLYKQISNGTSGGATNDNTYFGYSTPWGYFDFNRFHCHFSPRDWQRLINNNWGFRPKRLSFKLFNIQVKEVTQNEGTKTIANNLTSTIQVFTDSEYQLPYVLGSAHQGCLPPFPADVFMIPQYGYLTLNNGSQAVGRSSFYCLEYFPSQMLRTGNNFQFTYTFEDVPFHSSYAHSQSLDRLMNPLIDQYLYYLSRTQTTGGTANTQTLGFSQGGPNTMANQAKNWLPGPCYRQQRVSTRRSEDMGTINFAWTAGTKYHLNGRNSLANPGIAMATHKDDEERFFPSNGILIFGKQNAARDNADYSDVMLTSEEEIKTTNPVATEEYGIVADNLQQQNTAPQIGTVNSQGALPGMVWQNRDVYLQGPIWAKIPHTDGNFHPSPLMGGFGLKHPPPQILIKNTPVPADPRSTFNGDKLNSFITQYSTGQVSVEIEWELQKENSKRWNPEIQYTSNYYKSTSVDFAVNTEGVYSEPRPIGTRYLTRNL

SEQ ID NO: 402 - protein, 736 aa, Artificial Sequence
  AAV capsid variant
MAADGYLPDWLEDNLSEGIREWWALKPGAPQPKANQQHQDNARGLVLPGYKYLGPGNGLDKGEPVNAADAAALEHDKAYDQQLKAGDNPYLKYNHADAEFQERLKEDTSFGGNLGRAVFQAKKRLLEPLGLVEEAAKTAPGKKRPVEQSPQEPDSSAGIGKSGAQPAKKRLNFGQTGDSESVPDPQPLGEPPAAPSGVGPNTMAAGGGAPMADNNEGADGVGSSSGNWHCDSTWLGDRVITTSTRTWALPTYNNHLYKQISNGTSGGATNDNTYFGYSTPWGYFDFNRFHCHFSPRDWQRLINNNWGFRPKRLSFKLFNIQVKEVTQNEGTKTIANNLTSTIQVFTDSEYQLPYVLGSAHQGCLPPFPADVFMIPQYGYLTLNNGSQAVGRSSFYCLEYFPSQMLRTGNNFQFTYTFEDVPFHSSYAHSQSLDRLMNPLIDQYLYYLSRTQTTSNGRGVTLGFSQGGPNTMANQAKNWLPGPCYRQQRVSTVVGNGGVVNFAWTAGTKYHLNGRNSLANPGIAMATHKDDEERFFPSNGILIFGKQNAARDNADYSDVMLTSEEEIKTTNPVATEEYGIVADNLQQQNTAPQIGTVNSQGALPGMVWQNRDVYLQGPIWAKIPHTDGNFHPSPLMGGFGLKHPPPQILIKNTPVPADPRSTFNGDKLNSFITQYSTGQVSVEIEWELQKENSKRWNPEIQYTSNYYKSTSVDFAVNTEGVYSEPRPIGTRYLTRNL

SEQ ID NO: 403 - protein, 736 aa, Artificial Sequence
  AAV capsid variant
MAADGYLPDWLEDNLSEGIREWWALKPGAPQPKANQQHQDNARGLVLPGYKYLGPGNGLDKGEPVNAADAAALEHDKAYDQQLKAGDNPYLKYNHADAEFQERLKEDTSFGGNLGRAVFQAKKRLLEPLGLVEEAAKTAPGKKRPVEQSPQEPDSSAGIGKSGAQPAKKRLNFGQTGDSESVPDPQPLGEPPAAPSGVGPNTMAAGGGAPMADNNEGADGVGSSSGNWHCDSTWLGDRVITTSTRTWALPTYNNHLYKQISNGTSGGATNDNTYFGYSTPWGYFDFNRFHCHFSPRDWQRLINNNWGFRPKRLSFKLFNIQVKEVTQNEGTKTIANNLTSTIQVFTDSEYQLPYVLGSAHQGCLPPFPADVFMIPQYGYLTLNNGSQAVGRSSFYCLEYFPSQMLRTGNNFQFTYTFEDVPFHSSYAHSQSLDRLMNPLIDQYLYYLSRTQTTSNGRGVTLGFSQGGPNTMANQAKNWLPGPCYRQQRVSTNFREMPIGNFAWTAGTKYHLNGRNSLANPGIAMATHKDDEERFFPSNGILIFGKQNAARDNADYSDVMLTSEEEIKTTNPVATEEYGIVADNLQQQNTAPQIGTVNSQGALPGMVWQNRDVYLQGPIWAKIPHTDGNFHPSPLMGGFGLKHPPPQILIKNTPVPADPRSTFNGDKLNSFITQYSTGQVSVEIEWELQKENSKRWNPEIQYTSNYYKSTSVDFAVNTEGVYSEPRPIGTRYLTRNL

SEQ ID NO: 404 - protein, 737 aa, Artificial Sequence
  AAV capsid variant
MAADGYLPDWLEDNLSEGIREWWALKPGAPQPKANQQHQDNARGLVLPGYKYLGPGNGLDKGEPVNAADAAALEHDKAYDQQLKAGDNPYLKYNHADAEFQERLKEDTSFGGNLGRAVFQAKKRLLEPLGLVEEAAKTAPGKKRPVEQSPQEPDSSAGIGKSGAQPAKKRLNFGQTGDSESVPDPQPLGEPPAAPSGVGPNTMAAGGGAPMADNNEGADGVGSSSGNWHCDSTWLGDRVITTSTRTWALPTYNNHLYKQISNGTSGGATNDNTYFGYSTPWGYFDFNRFHCHFSPRDWQRLINNNWGFRPKRLSFKLFNIQVKEVTQNEGTKTIANNLTSTIQVFTDSEYQLPYVLGSAHQGCLPPFPADVFMIPQYGYLTLNNGSQAVGRSSFYCLEYFPSQMLRTGNNFQFTYTFEDVPFHSSYAHSQSLDRLMNPLIDQYLYYLSRTQTTSNGRGVTLGFSQGGPNTMANQAKNWLPGPCYRQQRVSTRRSEDMGTINFAWTAGTKYHLNGRNSLANPGIAMATHKDDEERFFPSNGILIFGKQNAARDNADYSDVMLTSEEEIKTTNPVATEEYGIVADNLQQQNTAPQIGTVNSQGALPGMVWQNRDVYLQGPIWAKIPHTDGNFHPSPLMGGFGLKHPPPQILIKNTPVPADPRSTFNGDKLNSFITQYSTGQVSVEIEWELQKENSKRWNPEIQYTSNYYKSTSVDFAVNTEGVYSEPRPIGTRYLTRNL

SEQ ID NO: 405 - protein, 737 aa, Artificial Sequence
  AAV capsid variant
MAADGYLPDWLEDNLSEGIREWWALKPGAPQPKANQQHQDNARGLVLPGYKYLGPGNGLDKGEPVNAADAAALEHDKAYDQQLKAGDNPYLKYNHADAEFQERLKEDTSFGGNLGRAVFQAKKRLLEPLGLVEEAAKTAPGKKRPVEQSPQEPDSSAGIGKSGAQPAKKRLNFGQTGDSESVPDPQPLGEPPAAPSGVGPNTMAAGGGAPMADNNEGADGVGSSSGNWHCDSTWLGDRVITTSTRTWALPTYNNHLYKQISNGTSGGATNDNTYFGYSTPWGYFDFNRFHCHFSPRDWQRLINNNWGFRPKRLSFKLFNIQVKEVTQNEGTKTIANNLTSTIQVFTDSEYQLPYVLGSAHQGCLPPFPADVFMIPQYGYLTLNNGSQAVGRSSFYCLEYFPSQMLRTGNNFQFTYTFEDVPFHSSYAHSQSLDRLMNPLIDQYLYYLSRTQTTGGTANTQTLGFSQGGPNTMANQAKNWLPGPCYRQQRVSTVVGNGGVVNFAWTAGTKYHLNGRNSLANPGIAMATHKDDEERFFPSNGILIFGKQNAARDNADYSDVMLTSEEEIKTTNPVATEEYGIVADNVMEPTRAPQIGTVNSQGALPGMVWQNRDVYLQGPIWAKIPHTDGNFHPSPLMGGFGLKHPPPQILIKNTPVPADPRSTFNGDKLNSFITQYSTGQVSVEIEWELQKENSKRWNPEIQYTSNYYKSTSVDFAVNTEGVYSEPRPIGTRYLTRNL

SEQ ID NO: 406 - protein, 737 aa, Artificial Sequence
  AAV capsid variant
MAADGYLPDWLEDNLSEGIREWWALKPGAPQPKANQQHQDNARGLVLPGYKYLGPGNGLDKGEPVNAADAAALEHDKAYDQQLKAGDNPYLKYNHADAEFQERLKEDTSFGGNLGRAVFQAKKRLLEPLGLVEEAAKTAPGKKRPVEQSPQEPDSSAGIGKSGAQPAKKRLNFGQTGDSESVPDPQPLGEPPAAPSGVGPNTMAAGGGAPMADNNEGADGVGSSSGNWHCDSTWLGDRVITTSTRTWALPTYNNHLYKQISNGTSGGATNDNTYFGYSTPWGYFDFNRFHCHFSPRDWQRLINNNWGFRPKRLSFKLFNIQVKEVTQNEGTKTIANNLTSTIQVFTDSEYQLPYVLGSAHQGCLPPFPADVFMIPQYGYLTLNNGSQAVGRSSFYCLEYFPSQMLRTGNNFQFTYTFEDVPFHSSYAHSQSLDRLMNPLIDQYLYYLSRTQTTGGTANTQTLGFSQGGPNTMANQAKNWLPGPCYRQQRVSTNFREMPIGNFAWTAGTKYHLNGRNSLANPGIAMATHKDDEERFFPSNGILIFGKQNAARDNADYSDVMLTSEEEIKTTNPVATEEYGIVADNVMEPTRAPQIGTVNSQGALPGMVWQNRDVYLQGPIWAKIPHTDGNFHPSPLMGGFGLKHPPPQILIKNTPVPADPRSTFNGDKLNSFITQYSTGQVSVEIEWELQKENSKRWNPEIQYTSNYYKSTSVDFAVNTEGVYSEPRPIGTRYLTRNL

SEQ ID NO: 407 - protein, 738 aa, Artificial Sequence
  AAV capsid variant
MAADGYLPDWLEDNLSEGIREWWALKPGAPQPKANQQHQDNARGLVLPGYKYLGPGNGLDKGEPVNAADAAALEHDKAYDQQLKAGDNPYLKYNHADAEFQERLKEDTSFGGNLGRAVFQAKKRLLEPLGLVEEAAKTAPGKKRPVEQSPQEPDSSAGIGKSGAQPAKKRLNFGQTGDSESVPDPQPLGEPPAAPSGVGPNTMAAGGGAPMADNNEGADGVGSSSGNWHCDSTWLGDRVITTSTRTWALPTYNNHLYKQISNGTSGGATNDNTYFGYSTPWGYFDFNRFHCHFSPRDWQRLINNNWGFRPKRLSFKLFNIQVKEVTQNEGTKTIANNLTSTIQVFTDSEYQLPYVLGSAHQGCLPPFPADVFMIPQYGYLTLNNGSQAVGRSSFYCLEYFPSQMLRTGNNFQFTYTFEDVPFHSSYAHSQSLDRLMNPLIDQYLYYLSRTQTTGGTANTQTLGFSQGGPNTMANQAKNWLPGPCYRQQRVSTRRSEDMGTINFAWTAGTKYHLNGRNSLANPGIAMATHKDDEERFFPSNGILIFGKQNAARDNADYSDVMLTSEEEIKTTNPVATEEYGIVADNVMEPTRAPQIGTVNSQGALPGMVWQNRDVYLQGPIWAKIPHTDGNFHPSPLMGGFGLKHPPPQILIKNTPVPADPRSTFNGDKLNSFITQYSTGQVSVEIEWELQKENSKRWNPEIQYTSNYYKSTSVDFAVNTEGVYSEPRPIGTRYLTRNL

SEQ ID NO: 408 - protein, 736 aa, Artificial Sequence
  AAV capsid variant
MAADGYLPDWLEDNLSEGIREWWALKPGAPQPKANQQHQDNARGLVLPGYKYLGPGNGLDKGEPVNAADAAALEHDKAYDQQLKAGDNPYLKYNHADAEFQERLKEDTSFGGNLGRAVFQAKKRLLEPLGLVEEAAKTAPGKKRPVEQSPQEPDSSAGIGKSGAQPAKKRLNFGQTGDSESVPDPQPLGEPPAAPSGVGPNTMAAGGGAPMADNNEGADGVGSSSGNWHCDSTWLGDRVITTSTRTWALPTYNNHLYKQISNGTSGGATNDNTYFGYSTPWGYFDFNRFHCHFSPRDWQRLINNNWGFRPKRLSFKLFNIQVKEVTQNEGTKTIANNLTSTIQVFTDSEYQLPYVLGSAHQGCLPPFPADVFMIPQYGYLTLNNGSQAVGRSSFYCLEYFPSQMLRTGNNFQFTYTFEDVPFHSSYAHSQSLDRLMNPLIDQYLYYLSRTQTTSNGRGVTLGFSQGGPNTMANQAKNWLPGPCYRQQRVSTVVGNGGVVNFAWTAGTKYHLNGRNSLANPGIAMATHKDDEERFFPSNGILIFGKQNAARDNADYSDVMLTSEEEIKTTNPVATEEYGIVADNVMEPTRAPQIGTVNSQGALPGMVWQNRDVYLQGPIWAKIPHTDGNFHPSPLMGGFGLKHPPPQILIKNTPVPADPRSTFNGDKLNSFITQYSTGQVSVEIEWELQKENSKRWNPEIQYTSNYYKSTSVDFAVNTEGVYSEPRPIGTRYLTRNL

SEQ ID NO: 409 - protein, 736 aa, Artificial Sequence
  AAV capsid variant
MAADGYLPDWLEDNLSEGIREWWALKPGAPQPKANQQHQDNARGLVLPGYKYLGPGNGLDKGEPVNAADAAALEHDKAYDQQLKAGDNPYLKYNHADAEFQERLKEDTSFGGNLGRAVFQAKKRLLEPLGLVEEAAKTAPGKKRPVEQSPQEPDSSAGIGKSGAQPAKKRLNFGQTGDSESVPDPQPLGEPPAAPSGVGPNTMAAGGGAPMADNNEGADGVGSSSGNWHCDSTWLGDRVITTSTRTWALPTYNNHLYKQISNGTSGGATNDNTYFGYSTPWGYFDFNRFHCHFSPRDWQRLINNNWGFRPKRLSFKLFNIQVKEVTQNEGTKTIANNLTSTIQVFTDSEYQLPYVLGSAHQGCLPPFPADVFMIPQYGYLTLNNGSQAVGRSSFYCLEYFPSQMLRTGNNFQFTYTFEDVPFHSSYAHSQSLDRLMNPLIDQYLYYLSRTQTTSNGRGVTLGFSQGGPNTMANQAKNWLPGPCYRQQRVSTNFREMPIGNFAWTAGTKYHLNGRNSLANPGIAMATHKDDEERFFPSNGILIFGKQNAARDNADYSDVMLTSEEEIKTTNPVATEEYGIVADNVMEPTRAPQIGTVNSQGALPGMVWQNRDVYLQGPIWAKIPHTDGNFHPSPLMGGFGLKHPPPQILIKNTPVPADPRSTFNGDKLNSFITQYSTGQVSVEIEWELQKENSKRWNPEIQYTSNYYKSTSVDFAVNTEGVYSEPRPIGTRYLTRNL

SEQ ID NO: 410 - protein, 737 aa, Artificial Sequence
  AAV capsid variant
MAADGYLPDWLEDNLSEGIREWWALKPGAPQPKANQQHQDNARGLVLPGYKYLGPGNGLDKGEPVNAADAAALEHDKAYDQQLKAGDNPYLKYNHADAEFQERLKEDTSFGGNLGRAVFQAKKRLLEPLGLVEEAAKTAPGKKRPVEQSPQEPDSSAGIGKSGAQPAKKRLNFGQTGDSESVPDPQPLGEPPAAPSGVGPNTMAAGGGAPMADNNEGADGVGSSSGNWHCDSTWLGDRVITTSTRTWALPTYNNHLYKQISNGTSGGATNDNTYFGYSTPWGYFDFNRFHCHFSPRDWQRLINNNWGFRPKRLSFKLFNIQVKEVTQNEGTKTIANNLTSTIQVFTDSEYQLPYVLGSAHQGCLPPFPADVFMIPQYGYLTLNNGSQAVGRSSFYCLEYFPSQMLRTGNNFQFTYTFEDVPFHSSYAHSQSLDRLMNPLIDQYLYYLSRTQTTSNGRGVTLGFSQGGPNTMANQAKNWLPGPCYRQQRVSTRRSEDMGTINFAWTAGTKYHLNGRNSLANPGIAMATHKDDEERFFPSNGILIFGKQNAARDNADYSDVMLTSEEEIKTTNPVATEEYGIVADNVMEPTRAPQIGTVNSQGALPGMVWQNRDVYLQGPIWAKIPHTDGNFHPSPLMGGFGLKHPPPQILIKNTPVPADPRSTFNGDKLNSFITQYSTGQVSVEIEWELQKENSKRWNPEIQYTSNYYKSTSVDFAVNTEGVYSEPRPIGTRYLTRNL

SEQ ID NO: 411 - protein, 8 aa, Artificial Sequence
  AAV capsid protein amino acid substitution
YPLQNNNS

SEQ ID NO: 412 - protein, 8 aa, Artificial Sequence
  AAV capsid protein amino acid substitution
YPLENFKY

SEQ ID NO: 413 - protein, 8 aa, Artificial Sequence
  AAV capsid protein amino acid substitution
YPLGDHSA

SEQ ID NO: 414 - protein, 8 aa, Artificial Sequence
  AAV capsid protein amino acid substitution
YPLASGSG

SEQ ID NO: 415 - protein, 8 aa, Artificial Sequence
  AAV capsid protein amino acid substitution
YPLLGKEQ

SEQ ID NO: 416 - protein, 8 aa, Artificial Sequence
  AAV capsid protein amino acid substitution
YPLSGTNQ

SEQ ID NO: 417 - protein, 8 aa, Artificial Sequence
  AAV capsid protein amino acid substitution
YPLRDGQL

SEQ ID NO: 418 - protein, 8 aa, Artificial Sequence
  AAV capsid protein amino acid substitution
YPLADTGT

SEQ ID NO: 419 - protein, 8 aa, Artificial Sequence
  AAV capsid protein amino acid substitution
YPLNGGVV

SEQ ID NO: 420 - protein, 8 aa, Artificial Sequence
  AAV capsid protein amino acid substitution
YPLEMPIG

SEQ ID NO: 421 - protein, 9 aa, Artificial Sequence
  AAV capsid protein amino acid substitution
YPLEDMGTI

SEQ ID NO: 422 - protein, 738 aa, Artificial Sequence
  AAV capsid variant
MAADGYLPDWLEDNLSEGIREWWALKPGAPKPKANQQKQDDGRGLVLPGYKYLGPFNGLDKGEPVNAADAAALEHDKAYDQQLQAGDNPYLRYNHADAEFQERLQEDTSFGGNLGRAVFQAKKRVLEPLGLVEEGAKTAPGKKRPVEPSPQRSPDSSTGIGKKGQQPARKRLNFGQTGDSESVPDPQPLGEPPAAPSGVGPNTMAAGGGAPMADNNEGADGVGSSSGNWHCDSTWLGDRVITTSTRTWALPTYNNHLYKQISNGTSGGATNDNTYFGYSTPWGYFDFNRFHCHFSPRDWQRLINNNWGFRPKRLSFKLFNIQVKEVTQNEGTKTIANNLTSTIQVFTDSEYQLPYVLGSAHQGCLPPFPADVFMIPQYGYLTLNNGSQAVGRSSFYCLEYFPSQMLRTGNNFQFTYTFEDVPFHSSYAHSQSLDRLMNPLIDQYLYYLSRTQTTGGTANTQTLGFSQGGPNTMANQAKNWLPGPCYRQQRVSTYPLQNNNSNFAWTAGTKYHLNGRNSLANPGIAMATHKDDEERFFPSNGILIFGKQNAARDNADYSDVMLTSEEEIKTTNPVATEEYGIVADNLQQQNTAPQIGTVNSQGALPGMVWQNRDVYLQGPIWAKIPHTDGNFHPSPLMGGFGLKHPPPQILIKNTPVPADPPTTFNQSKLNSFITQYSTGQVSVEIEWELQKENSKRWNPEIQYTSNYYKSTSVDFAVNTEGVYSEPRPIGTRYLTRNL

SEQ ID NO: 423 - protein, 737 aa, Artificial Sequence
  AAV capsid variant
MAADGYLPDWLEDNLSEGIREWWALKPGAPKPKANQQKQDDGRGLVLPGYKYLGPFNGLDKGEPVNAADAAALEHDKAYDQQLQAGDNPYLRYNHADAEFQERLQEDTSFGGNLGRAVFQAKKRVLEPLGLVEEGAKTAPGKKRPVEPSPQRSPDSSTGIGKKGQQPARKRLNFGQTGDSESVPDPQPLGEPPAAPSGVGPNTMAAGGGAPMADNNEGADGVGSSSGNWHCDSTWLGDRVITTSTRTWALPTYNNHLYKQISNGTSGGATNDNTYFGYSTPWGYFDFNRFHCHFSPRDWQRLINNNWGFRPKRLSFKLFNIQVKEVTQNEGTKTIANNLTSTIQVFTDSEYQLPYVLGSAHQGCLPPFPADVFMIPQYGYLTLNNGSQAVGRSSFYCLEYFPSQMLRTGNNFQFTYTFEDVPFHSSYAHSQSLDRLMNPLIDQYLYYLSRTQTTSNGRGVTLGFSQGGPNTMANQAKNWLPGPCYRQQRVSTYPLQNNNSNFAWTAGTKYHLNGRNSLANPGIAMATHKDDEERFFPSNGILIFGKQNAARDNADYSDVMLTSEEEIKTTNPVATEEYGIVADNLQQQNTAPQIGTVNSQGALPGMVWQNRDVYLQGPIWAKIPHTDGNFHPSPLMGGFGLKHPPPQILIKNTPVPADPPTTFNQSKLNSFITQYSTGQVSVEIEWELQKENSKRWNPEIQYTSNYYKSTSVDFAVNTEGVYSEPRPIGTRYLTRNL

SEQ ID NO: 424 - protein, 738 aa, Artificial Sequence
  AAV capsid variant
MAADGYLPDWLEDNLSEGIREWWALKPGAPKPKANQQKQDDGRGLVLPGYKYLGPFNGLDKGEPVNAADAAALEHDKAYDQQLQAGDNPYLRYNHADAEFQERLQEDTSFGGNLGRAVFQAKKRVLEPLGLVEEGAKTAPGKKRPVEPSPQRSPDSSTGIGKKGQQPARKRLNFGQTGDSESVPDPQPLGEPPAAPSGVGPNTMAAGGGAPMADNNEGADGVGSSSGNWHCDSTWLGDRVITTSTRTWALPTYNNHLYKQISNGTSGGATNDNTYFGYSTPWGYFDFNRFHCHFSPRDWQRLINNNWGFRPKRLSFKLFNIQVKEVTQNEGTKTIANNLTSTIQVFTDSEYQLPYVLGSAHQGCLPPFPADVFMIPQYGYLTLNNGSQAVGRSSFYCLEYFPSQMLRTGNNFQFTYTFEDVPFHSSYAHSQSLDRLMNPLIDQYLYYLSRTQTTGGTANTQTLGFSQGGPNTMANQAKNWLPGPCYRQQRVSTYPLQNNNSNFAWTAGTKYHLNGRNSLANPGIAMATHKDDEERFFPSNGILIFGKQNAARDNADYSDVMLTSEEEIKTTNPVATEEYGIVADNVMEPTRAPQIGTVNSQGALPGMVWQNRDVYLQGPIWAKIPHTDGNFHPSPLMGGFGLKHPPPQILIKNTPVPADPPTTFNQSKLNSFITQYSTGQVSVEIEWELQKENSKRWNPEIQYTSNYYKSTSVDFAVNTEGVYSEPRPIGTRYLTRNL

SEQ ID NO: 425 - protein, 737 aa, Artificial Sequence
  AAV capsid variant
MAADGYLPDWLEDNLSEGIREWWALKPGAPKPKANQQKQDDGRGLVLPGYKYLGPFNGLDKGEPVNAADAAALEHDKAYDQQLQAGDNPYLRYNHADAEFQERLQEDTSFGGNLGRAVFQAKKRVLEPLGLVEEGAKTAPGKKRPVEPSPQRSPDSSTGIGKKGQQPARKRLNFGQTGDSESVPDPQPLGEPPAAPSGVGPNTMAAGGGAPMADNNEGADGVGSSSGNWHCDSTWLGDRVITTSTRTWALPTYNNHLYKQISNGTSGGATNDNTYFGYSTPWGYFDFNRFHCHFSPRDWQRLINNNWGFRPKRLSFKLFNIQVKEVTQNEGTKTIANNLTSTIQVFTDSEYQLPYVLGSAHQGCLPPFPADVFMIPQYGYLTLNNGSQAVGRSSFYCLEYFPSQMLRTGNNFQFTYTFEDVPFHSSYAHSQSLDRLMNPLIDQYLYYLSRTQTTSNGRGVTLGFSQGGPNTMANQAKNWLPGPCYRQQRVSTYPLQNNNSNFAWTAGTKYHLNGRNSLANPGIAMATHKDDEERFFPSNGILIFGKQNAARDNADYSDVMLTSEEEIKTTNPVATEEYGIVADNVMEPTRAPQIGTVNSQGALPGMVWQNRDVYLQGPIWAKIPHTDGNFHPSPLMGGFGLKHPPPQILIKNTPVPADPPTTFNQSKLNSFITQYSTGQVSVEIEWELQKENSKRWNPEIQYTSNYYKSTSVDFAVNTEGVYSEPRPIGTRYLTRNL

SEQ ID NO: 426 - protein, 737 aa, Artificial Sequence
  AAV capsid variant
MAADGYLPDWLEDNLSEGIREWWALKPGAPQPKANQQHQDNARGLVLPGYKYLGPGNGLDKGEPVNAADAAALEHDKAYDQQLKAGDNPYLKYNHADAEFQERLKEDTSFGGNLGRAVFQAKKRLLEPLGLVEEAAKTAPGKKRPVEQSPQEPDSSAGIGKSGAQPAKKRLNFGQTGDSESVPDPQPLGEPPAAPSGVGPNTMAAGGGAPMADNNEGADGVGSSSGNWHCDSTWLGDRVITTSTRTWALPTYNNHLYKQISNGTSGGATNDNTYFGYSTPWGYFDFNRFHCHFSPRDWQRLINNNWGFRPKRLSFKLFNIQVKEVTQNEGTKTIANNLTSTIQVFTDSEYQLPYVLGSAHQGCLPPFPADVFMIPQYGYLTLNNGSQAVGRSSFYCLEYFPSQMLRTGNNFQFTYTFEDVPFHSSYAHSQSLDRLMNPLIDQYLYYLSRTQTTGGTANTQTLGFSQGGPNTMANQAKNWLPGPCYRQQRVSTYPLQNNNSNFAWTAGTKYHLNGRNSLANPGIAMATHKDDEERFFPSNGILIFGKQNAARDNADYSDVMLTSEEEIKTTNPVATEEYGIVADNLQQQNTAPQIGTVNSQGALPGMVWQNRDVYLQGPIWAKIPHTDGNFHPSPLMGGFGLKHPPPQILIKNTPVPADPPTTFNQSKLNSFITQYSTGQVSVEIEWELQKENSKRWNPEIQYTSNYYKSTSVDFAVNTEGVYSEPRPIGTRYLTRNL

SEQ ID NO: 427 - protein, 736 aa, Artificial Sequence
  AAV capsid variant
MAADGYLPDWLEDNLSEGIREWWALKPGAPQPKANQQHQDNARGLVLPGYKYLGPGNGLDKGEPVNAADAAALEHDKAYDQQLKAGDNPYLKYNHADAEFQERLKEDTSFGGNLGRAVFQAKKRLLEPLGLVEEAAKTAPGKKRPVEQSPQEPDSSAGIGKSGAQPAKKRLNFGQTGDSESVPDPQPLGEPPAAPSGVGPNTMAAGGGAPMADNNEGADGVGSSSGNWHCDSTWLGDRVITTSTRTWALPTYNNHLYKQISNGTSGGATNDNTYFGYSTPWGYFDFNRFHCHFSPRDWQRLINNNWGFRPKRLSFKLFNIQVKEVTQNEGTKTIANNLTSTIQVFTDSEYQLPYVLGSAHQGCLPPFPADVFMIPQYGYLTLNNGSQAVGRSSFYCLEYFPSQMLRTGNNFQFTYTFEDVPFHSSYAHSQSLDRLMNPLIDQYLYYLSRTQTTSNGRGVTLGFSQGGPNTMANQAKNWLPGPCYRQQRVSTYPLQNNNSNFAWTAGTKYHLNGRNSLANPGIAMATHKDDEERFFPSNGILIFGKQNAARDNADYSDVMLTSEEEIKTTNPVATEEYGIVADNLQQQNTAPQIGTVNSQGALPGMVWQNRDVYLQGPIWAKIPHTDGNFHPSPLMGGFGLKHPPPQILIKNTPVPADPPTTFNQSKLNSFITQYSTGQVSVEIEWELQKENSKRWNPEIQYTSNYYKSTSVDFAVNTEGVYSEPRPIGTRYLTRNL

SEQ ID NO: 428 - protein, 737 aa, Artificial Sequence
  AAV capsid variant
MAADGYLPDWLEDNLSEGIREWWALKPGAPQPKANQQHQDNARGLVLPGYKYLGPGNGLDKGEPVNAADAAALEHDKAYDQQLKAGDNPYLKYNHADAEFQERLKEDTSFGGNLGRAVFQAKKRLLEPLGLVEEAAKTAPGKKRPVEQSPQEPDSSAGIGKSGAQPAKKRLNFGQTGDSESVPDPQPLGEPPAAPSGVGPNTMAAGGGAPMADNNEGADGVGSSSGNWHCDSTWLGDRVITTSTRTWALPTYNNHLYKQISNGTSGGATNDNTYFGYSTPWGYFDFNRFHCHFSPRDWQRLINNNWGFRPKRLSFKLFNIQVKEVTQNEGTKTIANNLTSTIQVFTDSEYQLPYVLGSAHQGCLPPFPADVFMIPQYGYLTLNNGSQAVGRSSFYCLEYFPSQMLRTGNNFQFTYTFEDVPFHSSYAHSQSLDRLMNPLIDQYLYYLSRTQTTGGTANTQTLGFSQGGPNTMANQAKNWLPGPCYRQQRVSTYPLQNNNSNFAWTAGTKYHLNGRNSLANPGIAMATHKDDEERFFPSNGILIFGKQNAARDNADYSDVMLTSEEEIKTTNPVATEEYGIVADNVMEPTRAPQIGTVNSQGALPGMVWQNRDVYLQGPIWAKIPHTDGNFHPSPLMGGFGLKHPPPQILIKNTPVPADPPTTFNQSKLNSFITQYSTGQVSVEIEWELQKENSKRWNPEIQYTSNYYKSTSVDFAVNTEGVYSEPRPIGTRYLTRNL

SEQ ID NO: 429 - protein, 736 aa, Artificial Sequence
  AAV capsid variant
MAADGYLPDWLEDNLSEGIREWWALKPGAPQPKANQQHQDNARGLVLPGYKYLGPGNGLDKGEPVNAADAAALEHDKAYDQQLKAGDNPYLKYNHADAEFQERLKEDTSFGGNLGRAVFQAKKRLLEPLGLVEEAAKTAPGKKRPVEQSPQEPDSSAGIGKSGAQPAKKRLNFGQTGDSESVPDPQPLGEPPAAPSGVGPNTMAAGGGAPMADNNEGADGVGSSSGNWHCDSTWLGDRVITTSTRTWALPTYNNHLYKQISNGTSGGATNDNTYFGYSTPWGYFDFNRFHCHFSPRDWQRLINNNWGFRPKRLSFKLFNIQVKEVTQNEGTKTIANNLTSTIQVFTDSEYQLPYVLGSAHQGCLPPFPADVFMIPQYGYLTLNNGSQAVGRSSFYCLEYFPSQMLRTGNNFQFTYTFEDVPFHSSYAHSQSLDRLMNPLIDQYLYYLSRTQTTSNGRGVTLGFSQGGPNTMANQAKNWLPGPCYRQQRVSTYPLQNNNSNFAWTAGTKYHLNGRNSLANPGIAMATHKDDEERFFPSNGILIFGKQNAARDNADYSDVMLTSEEEIKTTNPVATEEYGIVADNVMEPTRAPQIGTVNSQGALPGMVWQNRDVYLQGPIWAKIPHTDGNFHPSPLMGGFGLKHPPPQILIKNTPVPADPPTTFNQSKLNSFITQYSTGQVSVEIEWELQKENSKRWNPEIQYTSNYYKSTSVDFAVNTEGVYSEPRPIGTRYLTRNL

SEQ ID NO: 430 - protein, 738 aa, Artificial Sequence
  AAV capsid variant
MAADGYLPDWLEDNLSEGIREWWALKPGAPKPKANQQKQDDGRGLVLPGYKYLGPFNGLDKGEPVNAADAAALEHDKAYDQQLQAGDNPYLRYNHADAEFQERLQEDTSFGGNLGRAVFQAKKRVLEPLGLVEEGAKTAPGKKRPVEPSPQRSPDSSTGIGKKGQQPARKRLNFGQTGDSESVPDPQPLGEPPAAPSGVGPNTMAAGGGAPMADNNEGADGVGSSSGNWHCDSTWLGDRVITTSTRTWALPTYNNHLYKQISNGTSGGATNDNTYFGYSTPWGYFDFNRFHCHFSPRDWQRLINNNWGFRPKRLSFKLFNIQVKEVTQNEGTKTIANNLTSTIQVFTDSEYQLPYVLGSAHQGCLPPFPADVFMIPQYGYLTLNNGSQAVGRSSFYCLEYFPSQMLRTGNNFQFTYTFEDVPFHSSYAHSQSLDRLMNPLIDQYLYYLSRTQTTGGTANTQTLGFSQGGPNTMANQAKNWLPGPCYRQQRVSTYPLQNNNSNFAWTAGTKYHLNGRNSLANPGIAMATHKDDEERFFPSNGILIFGKQNAARDNADYSDVMLTSEEEIKTTNPVATEEYGIVADNLQQQNTAPQIGTVNSQGALPGMVWQNRDVYLQGPIWAKIPHTDGNFHPSPLMGGFGLKHPPPQILIKNTPVPADPRSTFNGDKLNSFITQYSTGQVSVEIEWELQKENSKRWNPEIQYTSNYYKSTSVDFAVNTEGVYSEPRPIGTRYLTRNL

SEQ ID NO: 431 - protein, 737 aa, Artificial Sequence
  AAV capsid variant
MAADGYLPDWLEDNLSEGIREWWALKPGAPKPKANQQKQDDGRGLVLPGYKYLGPFNGLDKGEPVNAADAAALEHDKAYDQQLQAGDNPYLRYNHADAEFQERLQEDTSFGGNLGRAVFQAKKRVLEPLGLVEEGAKTAPGKKRPVEPSPQRSPDSSTGIGKKGQQPARKRLNFGQTGDSESVPDPQPLGEPPAAPSGVGPNTMAAGGGAPMADNNEGADGVGSSSGNWHCDSTWLGDRVITTSTRTWALPTYNNHLYKQISNGTSGGATNDNTYFGYSTPWGYFDFNRFHCHFSPRDWQRLINNNWGFRPKRLSFKLFNIQVKEVTQNEGTKTIANNLTSTIQVFTDSEYQLPYVLGSAHQGCLPPFPADVFMIPQYGYLTLNNGSQAVGRSSFYCLEYFPSQMLRTGNNFQFTYTFEDVPFHSSYAHSQSLDRLMNPLIDQYLYYLSRTQTTSNGRGVTLGFSQGGPNTMANQAKNWLPGPCYRQQRVSTYPLQNNNSNFAWTAGTKYHLNGRNSLANPGIAMATHKDDEERFFPSNGILIFGKQNAARDNADYSDVMLTSEEEIKTTNPVATEEYGIVADNLQQQNTAPQIGTVNSQGALPGMVWQNRDVYLQGPIWAKIPHTDGNFHPSPLMGGFGLKHPPPQILIKNTPVPADPRSTFNGDKLNSFITQYSTGQVSVEIEWELQKENSKRWNPEIQYTSNYYKSTSVDFAVNTEGVYSEPRPIGTRYLTRNL

SEQ ID NO: 432 - protein, 738 aa, Artificial Sequence
  AAV capsid variant
MAADGYLPDWLEDNLSEGIREWWALKPGAPKPKANQQKQDDGRGLVLPGYKYLGPFNGLDKGEPVNAADAAALEHDKAYDQQLQAGDNPYLRYNHADAEFQERLQEDTSFGGNLGRAVFQAKKRVLEPLGLVEEGAKTAPGKKRPVEPSPQRSPDSSTGIGKKGQQPARKRLNFGQTGDSESVPDPQPLGEPPAAPSGVGPNTMAAGGGAPMADNNEGADGVGSSSGNWHCDSTWLGDRVITTSTRTWALPTYNNHLYKQISNGTSGGATNDNTYFGYSTPWGYFDFNRFHCHFSPRDWQRLINNNWGFRPKRLSFKLFNIQVKEVTQNEGTKTIANNLTSTIQVFTDSEYQLPYVLGSAHQGCLPPFPADVFMIPQYGYLTLNNGSQAVGRSSFYCLEYFPSQMLRTGNNFQFTYTFEDVPFHSSYAHSQSLDRLMNPLIDQYLYYLSRTQTTGGTANTQTLGFSQGGPNTMANQAKNWLPGPCYRQQRVSTYPLQNNNSNFAWTAGTKYHLNGRNSLANPGIAMATHKDDEERFFPSNGILIFGKQNAARDNADYSDVMLTSEEEIKTTNPVATEEYGIVADNVMEPTRAPQIGTVNSQGALPGMVWQNRDVYLQGPIWAKIPHTDGNFHPSPLMGGFGLKHPPPQILIKNTPVPADPRSTFNGDKLNSFITQYSTGQVSVEIEWELQKENSKRWNPEIQYTSNYYKSTSVDFAVNTEGVYSEPRPIGTRYLTRNL

SEQ ID NO: 433 - protein, 737 aa, Artificial Sequence
  AAV capsid variant
MAADGYLPDWLEDNLSEGIREWWALKPGAPKPKANQQKQDDGRGLVLPGYKYLGPFNGLDKGEPVNAADAAALEHDKAYDQQLQAGDNPYLRYNHADAEFQERLQEDTSFGGNLGRAVFQAKKRVLEPLGLVEEGAKTAPGKKRPVEPSPQRSPDSSTGIGKKGQQPARKRLNFGQTGDSESVPDPQPLGEPPAAPSGVGPNTMAAGGGAPMADNNEGADGVGSSSGNWHCDSTWLGDRVITTSTRTWALPTYNNHLYKQISNGTSGGATNDNTYFGYSTPWGYFDFNRFHCHFSPRDWQRLINNNWGFRPKRLSFKLFNIQVKEVTQNEGTKTIANNLTSTIQVFTDSEYQLPYVLGSAHQGCLPPFPADVFMIPQYGYLTLNNGSQAVGRSSFYCLEYFPSQMLRTGNNFQFTYTFEDVPFHSSYAHSQSLDRLMNPLIDQYLYYLSRTQTTSNGRGVTLGFSQGGPNTMANQAKNWLPGPCYRQQRVSTYPLQNNNSNFAWTAGTKYHLNGRNSLANPGIAMATHKDDEERFFPSNGILIFGKQNAARDNADYSDVMLTSEEEIKTTNPVATEEYGIVADNVMEPTRAPQIGTVNSQGALPGMVWQNRDVYLQGPIWAKIPHTDGNFHPSPLMGGFGLKHPPPQILIKNTPVPADPRSTFNGDKLNSFITQYSTGQVSVEIEWELQKENSKRWNPEIQYTSNYYKSTSVDFAVNTEGVYSEPRPIGTRYLTRNL

SEQ ID NO: 434 - protein, 737 aa, Artificial Sequence
  AAV capsid variant
MAADGYLPDWLEDNLSEGIREWWALKPGAPQPKANQQHQDNARGLVLPGYKYLGPGNGLDKGEPVNAADAAALEHDKAYDQQLKAGDNPYLKYNHADAEFQERLKEDTSFGGNLGRAVFQAKKRLLEPLGLVEEAAKTAPGKKRPVEQSPQEPDSSAGIGKSGAQPAKKRLNFGQTGDSESVPDPQPLGEPPAAPSGVGPNTMAAGGGAPMADNNEGADGVGSSSGNWHCDSTWLGDRVITTSTRTWALPTYNNHLYKQISNGTSGGATNDNTYFGYSTPWGYFDFNRFHCHFSPRDWQRLINNNWGFRPKRLSFKLFNIQVKEVTQNEGTKTIANNLTSTIQVFTDSEYQLPYVLGSAHQGCLPPFPADVFMIPQYGYLTLNNGSQAVGRSSFYCLEYFPSQMLRTGNNFQFTYTFEDVPFHSSYAHSQSLDRLMNPLIDQYLYYLSRTQTTGGTANTQTLGFSQGGPNTMANQAKNWLPGPCYRQQRVSTYPLQNNNSNFAWTAGTKYHLNGRNSLANPGIAMATHKDDEERFFPSNGILIFGKQNAARDNADYSDVMLTSEEEIKTTNPVATEEYGIVADNLQQQNTAPQIGTVNSQGALPGMVWQNRDVYLQGPIWAKIPHTDGNFHPSPLMGGFGLKHPPPQILIKNTPVPADPRSTFNGDKLNSFITQYSTGQVSVEIEWELQKENSKRWNPEIQYTSNYYKSTSVDFAVNTEGVYSEPRPIGTRYLTRNL

SEQ ID NO: 435 - protein, 736 aa, Artificial Sequence
  AAV capsid variant
MAADGYLPDWLEDNLSEGIREWWALKPGAPQPKANQQHQDNARGLVLPGYKYLGPGNGLDKGEPVNAADAAALEHDKAYDQQLKAGDNPYLKYNHADAEFQERLKEDTSFGGNLGRAVFQAKKRLLEPLGLVEEAAKTAPGKKRPVEQSPQEPDSSAGIGKSGAQPAKKRLNFGQTGDSESVPDPQPLGEPPAAPSGVGPNTMAAGGGAPMADNNEGADGVGSSSGNWHCDSTWLGDRVITTSTRTWALPTYNNHLYKQISNGTSGGATNDNTYFGYSTPWGYFDFNRFHCHFSPRDWQRLINNNWGFRPKRLSFKLFNIQVKEVTQNEGTKTIANNLTSTIQVFTDSEYQLPYVLGSAHQGCLPPFPADVFMIPQYGYLTLNNGSQAVGRSSFYCLEYFPSQMLRTGNNFQFTYTFEDVPFHSSYAHSQSLDRLMNPLIDQYLYYLSRTQTTSNGRGVTLGFSQGGPNTMANQAKNWLPGPCYRQQRVSTYPLQNNNSNFAWTAGTKYHLNGRNSLANPGIAMATHKDDEERFFPSNGILIFGKQNAARDNADYSDVMLTSEEEIKTTNPVATEEYGIVADNLQQQNTAPQIGTVNSQGALPGMVWQNRDVYLQGPIWAKIPHTDGNFHPSPLMGGFGLKHPPPQILIKNTPVPADPRSTFNGDKLNSFITQYSTGQVSVEIEWELQKENSKRWNPEIQYTSNYYKSTSVDFAVNTEGVYSEPRPIGTRYLTRNL

SEQ ID NO: 436 - protein, 737 aa, Artificial Sequence
  AAV capsid variant
MAADGYLPDWLEDNLSEGIREWWALKPGAPQPKANQQHQDNARGLVLPGYKYLGPGNGLDKGEPVNAADAAALEHDKAYDQQLKAGDNPYLKYNHADAEFQERLKEDTSFGGNLGRAVFQAKKRLLEPLGLVEEAAKTAPGKKRPVEQSPQEPDSSAGIGKSGAQPAKKRLNFGQTGDSESVPDPQPLGEPPAAPSGVGPNTMAAGGGAPMADNNEGADGVGSSSGNWHCDSTWLGDRVITTSTRTWALPTYNNHLYKQISNGTSGGATNDNTYFGYSTPWGYFDFNRFHCHFSPRDWQRLINNNWGFRPKRLSFKLFNIQVKEVTQNEGTKTIANNLTSTIQVFTDSEYQLPYVLGSAHQGCLPPFPADVFMIPQYGYLTLNNGSQAVGRSSFYCLEYFPSQMLRTGNNFQFTYTFEDVPFHSSYAHSQSLDRLMNPLIDQYLYYLSRTQTTGGTANTQTLGFSQGGPNTMANQAKNWLPGPCYRQQRVSTYPLQNNNSNFAWTAGTKYHLNGRNSLANPGIAMATHKDDEERFFPSNGILIFGKQNAARDNADYSDVMLTSEEEIKTTNPVATEEYGIVADNVMEPTRAPQIGTVNSQGALPGMVWQNRDVYLQGPIWAKIPHTDGNFHPSPLMGGFGLKHPPPQILIKNTPVPADPRSTFNGDKLNSFITQYSTGQVSVEIEWELQKENSKRWNPEIQYTSNYYKSTSVDFAVNTEGVYSEPRPIGTRYLTRNL

SEQ ID NO: 437 - protein, 736 aa, Artificial Sequence
  AAV capsid variant
MAADGYLPDWLEDNLSEGIREWWALKPGAPQPKANQQHQDNARGLVLPGYKYLGPGNGLDKGEPVNAADAAALEHDKAYDQQLKAGDNPYLKYNHADAEFQERLKEDTSFGGNLGRAVFQAKKRLLEPLGLVEEAAKTAPGKKRPVEQSPQEPDSSAGIGKSGAQPAKKRLNFGQTGDSESVPDPQPLGEPPAAPSGVGPNTMAAGGGAPMADNNEGADGVGSSSGNWHCDSTWLGDRVITTSTRTWALPTYNNHLYKQISNGTSGGATNDNTYFGYSTPWGYFDFNRFHCHFSPRDWQRLINNNWGFRPKRLSFKLFNIQVKEVTQNEGTKTIANNLTSTIQVFTDSEYQLPYVLGSAHQGCLPPFPADVFMIPQYGYLTLNNGSQAVGRSSFYCLEYFPSQMLRTGNNFQFTYTFEDVPFHSSYAHSQSLDRLMNPLIDQYLYYLSRTQTTSNGRGVTLGFSQGGPNTMANQAKNWLPGPCYRQQRVSTYPLQNNNSNFAWTAGTKYHLNGRNSLANPGIAMATHKDDEERFFPSNGILIFGKQNAARDNADYSDVMLTSEEEIKTTNPVATEEYGIVADNVMEPTRAPQIGTVNSQGALPGMVWQNRDVYLQGPIWAKIPHTDGNFHPSPLMGGFGLKHPPPQILIKNTPVPADPRSTFNGDKLNSFITQYSTGQVSVEIEWELQKENSKRWNPEIQYTSNYYKSTSVDFAVNTEGVYSEPRPIGTRYLTRNL

SEQ ID NO: 438 - protein, 737 aa, Artificial Sequence; identical to SEQ ID NO: 423
  AAV capsid variant

SEQ ID NO: 439 - protein, 738 aa, Artificial Sequence
  AAV capsid variant
MAADGYLPDWLEDNLSEGIREWWALKPGAPKPKANQQKQDDGRGLVLPGYKYLGPFNGLDKGEPVNAADAAALEHDKAYDQQLQAGDNPYLRYNHADAEFQERLQEDTSFGGNLGRAVFQAKKRVLEPLGLVEEGAKTAPGKKRPVEPSPQRSPDSSTGIGKKGQQPARKRLNFGQTGDSESVPDPQPLGEPPAAPSGVGPNTMAAGGGAPMADNNEGADGVGSSSGNWHCDSTWLGDRVITTSTRTWALPTYNNHLYKQISNGTSGGATNDNTYFGYSTPWGYFDFNRFHCHFSPRDWQRLINNNWGFRPKRLSFKLFNIQVKEVTQNEGTKTIANNLTSTIQVFTDSEYQLPYVLGSAHQGCLPPFPADVFMIPQYGYLTLNNGSQAVGRSSFYCLEYFPSQMLRTGNNFQFTYTFEDVPFHSSYAHSQSLDRLMNPLIDQYLYYLSRTQTTGGTANTQTLGFSQGGPNTMANQAKNWLPGPCYRQQRVSTYPLENFKYNFAWTAGTKYHLNGRNSLANPGIAMATHKDDEERFFPSNGILIFGKQNAARDNADYSDVMLTSEEEIKTTNPVATEEYGIVADNLQQQNTAPQIGTVNSQGALPGMVWQNRDVYLQGPIWAKIPHTDGNFHPSPLMGGFGLKHPPPQILIKNTPVPADPPTTFNQSKLNSFITQYSTGQVSVEIEWELQKENSKRWNPEIQYTSNYYKSTSVDFAVNTEGVYSEPRPIGTRYLTRNL

SEQ ID NO: 440 - protein, 738 aa, Artificial Sequence
  AAV capsid variant
MAADGYLPDWLEDNLSEGIREWWALKPGAPKPKANQQKQDDGRGLVLPGYKYLGPFNGLDKGEPVNAADAAALEHDKAYDQQLQAGDNPYLRYNHADAEFQERLQEDTSFGGNLGRAVFQAKKRVLEPLGLVEEGAKTAPGKKRPVEPSPQRSPDSSTGIGKKGQQPARKRLNFGQTGDSESVPDPQPLGEPPAAPSGVGPNTMAAGGGAPMADNNEGADGVGSSSGNWHCDSTWLGDRVITTSTRTWALPTYNNHLYKQISNGTSGGATNDNTYFGYSTPWGYFDFNRFHCHFSPRDWQRLINNNWGFRPKRLSFKLFNIQVKEVTQNEGTKTIANNLTSTIQVFTDSEYQLPYVLGSAHQGCLPPFPADVFMIPQYGYLTLNNGSQAVGRSSFYCLEYFPSQMLRTGNNFQFTYTFEDVPFHSSYAHSQSLDRLMNPLIDQYLYYLSRTQTTGGTANTQTLGFSQGGPNTMANQAKNWLPGPCYRQQRVSTYPLGDHSANFAWTAGTKYHLNGRNSLANPGIAMATHKDDEERFFPSNGILIFGKQNAARDNADYSDVMLTSEEEIKTTNPVATEEYGIVADNLQQQNTAPQIGTVNSQGALPGMVWQNRDVYLQGPIWAKIPHTDGNFHPSPLMGGFGLKHPPPQILIKNTPVPADPPTTFNQSKLNSFITQYSTGQVSVEIEWELQKENSKRWNPEIQYTSNYYKSTSVDFAVNTEGVYSEPRPIGTRYLTRNL

SEQ ID NO: 441 - protein, 738 aa, Artificial Sequence
  AAV capsid variant
MAADGYLPDWLEDNLSEGIREWWALKPGAPKPKANQQKQDDGRGLVLPGYKYLGPFNGLDKGEPVNAADAAALEHDKAYDQQLQAGDNPYLRYNHADAEFQERLQEDTSFGGNLGRAVFQAKKRVLEPLGLVEEGAKTAPGKKRPVEPSPQRSPDSSTGIGKKGQQPARKRLNFGQTGDSESVPDPQPLGEPPAAPSGVGPNTMAAGGGAPMADNNEGADGVGSSSGNWHCDSTWLGDRVITTSTRTWALPTYNNHLYKQISNGTSGGATNDNTYFGYSTPWGYFDFNRFHCHFSPRDWQRLINNNWGFRPKRLSFKLFNIQVKEVTQNEGTKTIANNLTSTIQVFTDSEYQLPYVLGSAHQGCLPPFPADVFMIPQYGYLTLNNGSQAVGRSSFYCLEYFPSQMLRTGNNFQFTYTFEDVPFHSSYAHSQSLDRLMNPLIDQYLYYLSRTQTTGGTANTQTLGFSQGGPNTMANQAKNWLPGPCYRQQRVSTYPLASGSGNFAWTAGTKYHLNGRNSLANPGIAMATHKDDEERFFPSNGILIFGKQNAARDNADYSDVMLTSEEEIKTTNPVATEEYGIVADNLQQQNTAPQIGTVNSQGALPGMVWQNRDVYLQGPIWAKIPHTDGNFHPSPLMGGFGLKHPPPQILIKNTPVPADPPTTFNQSKLNSFITQYSTGQVSVEIEWELQKENSKRWNPEIQYTSNYYKSTSVDFAVNTEGVYSEPRPIGTRYLTRNL

SEQ ID NO: 442 - protein, 738 aa, Artificial Sequence
  AAV capsid variant
MAADGYLPDWLEDNLSEGIREWWALKPGAPKPKANQQKQDDGRGLVLPGYKYLGPFNGLDKGEPVNAADAAALEHDKAYDQQLQAGDNPYLRYNHADAEFQERLQEDTSFGGNLGRAVFQAKKRVLEPLGLVEEGAKTAPGKKRPVEPSPQRSPDSSTGIGKKGQQPARKRLNFGQTGDSESVPDPQPLGEPPAAPSGVGPNTMAAGGGAPMADNNEGADGVGSSSGNWHCDSTWLGDRVITTSTRTWALPTYNNHLYKQISNGTSGGATNDNTYFGYSTPWGYFDFNRFHCHFSPRDWQRLINNNWGFRPKRLSFKLFNIQVKEVTQNEGTKTIANNLTSTIQVFTDSEYQLPYVLGSAHQGCLPPFPADVFMIPQYGYLTLNNGSQAVGRSSFYCLEYFPSQMLRTGNNFQFTYTFEDVPFHSSYAHSQSLDRLMNPLIDQYLYYLSRTQTTGGTANTQTLGFSQGGPNTMANQAKNWLPGPCYRQQRVSTYPLLGKEQNFAWTAGTKYHLNGRNSLANPGIAMATHKDDEERFFPSNGILIFGKQNAARDNADYSDVMLTSEEEIKTTNPVATEEYGIVADNLQQQNTAPQIGTVNSQGALPGMVWQNRDVYLQGPIWAKIPHTDGNFHPSPLMGGFGLKHPPPQILIKNTPVPADPPTTFNQSKLNSFITQYSTGQVSVEIEWELQKENSKRWNPEIQYTSNYYKSTSVDFAVNTEGVYSEPRPIGTRYLTRNL

SEQ ID NO: 443 - protein, 738 aa, Artificial Sequence
  AAV capsid variant
MAADGYLPDWLEDNLSEGIREWWALKPGAPKPKANQQKQDDGRGLVLPGYKYLGPFNGLDKGEPVNAADAAALEHDKAYDQQLQAGDNPYLRYNHADAEFQERLQEDTSFGGNLGRAVFQAKKRVLEPLGLVEEGAKTAPGKKRPVEPSPQRSPDSSTGIGKKGQQPARKRLNFGQTGDSESVPDPQPLGEPPAAPSGVGPNTMAAGGGAPMADNNEGADGVGSSSGNWHCDSTWLGDRVITTSTRTWALPTYNNHLYKQISNGTSGGATNDNTYFGYSTPWGYFDFNRFHCHFSPRDWQRLINNNWGFRPKRLSFKLFNIQVKEVTQNEGTKTIANNLTSTIQVFTDSEYQLPYVLGSAHQGCLPPFPADVFMIPQYGYLTLNNGSQAVGRSSFYCLEYFPSQMLRTGNNFQFTYTFEDVPFHSSYAHSQSLDRLMNPLIDQYLYYLSRTQTTGGTANTQTLGFSQGGPNTMANQAKNWLPGPCYRQQRVSTYPLSGTNQNFAWTAGTKYHLNGRNSLANPGIAMATHKDDEERFFPSNGILIFGKQNAARDNADYSDVMLTSEEEIKTTNPVATEEYGIVADNLQQQNTAPQIGTVNSQGALPGMVWQNRDVYLQGPIWAKIPHTDGNFHPSPLMGGFGLKHPPPQILIKNTPVPADPPTTFNQSKLNSFITQYSTGQVSVEIEWELQKENSKRWNPEIQYTSNYYKSTSVDFAVNTEGVYSEPRPIGTRYLTRNL

SEQ ID NO: 444 - protein, 738 aa, Artificial Sequence
  AAV capsid variant
MAADGYLPDWLEDNLSEGIREWWALKPGAPKPKANQQKQDDGRGLVLPGYKYLGPFNGLDKGEPVNAADAAALEHDKAYDQQLQAGDNPYLRYNHADAEFQERLQEDTSFGGNLGRAVFQAKKRVLEPLGLVEEGAKTAPGKKRPVEPSPQRSPDSSTGIGKKGQQPARKRLNFGQTGDSESVPDPQPLGEPPAAPSGVGPNTMAAGGGAPMADNNEGADGVGSSSGNWHCDSTWLGDRVITTSTRTWALPTYNNHLYKQISNGTSGGATNDNTYFGYSTPWGYFDFNRFHCHFSPRDWQRLINNNWGFRPKRLSFKLFNIQVKEVTQNEGTKTIANNLTSTIQVFTDSEYQLPYVLGSAHQGCLPPFPADVFMIPQYGYLTLNNGSQAVGRSSFYCLEYFPSQMLRTGNNFQFTYTFEDVPFHSSYAHSQSLDRLMNPLIDQYLYYLSRTQTTGGTANTQTLGFSQGGPNTMANQAKNWLPGPCYRQQRVSTYPLRDGQLNFAWTAGTKYHLNGRNSLANPGIAMATHKDDEERFFPSNGILIFGKQNAARDNADYSDVMLTSEEEIKTTNPVATEEYGIVADNLQQQNTAPQIGTVNSQGALPGMVWQNRDVYLQGPIWAKIPHTDGNFHPSPLMGGFGLKHPPPQILIKNTPVPADPPTTFNQSKLNSFITQYSTGQVSVEIEWELQKENSKRWNPEIQYTSNYYKSTSVDFAVNTEGVYSEPRPIGTRYLTRNL

SEQ ID NO: 445 - protein, 738 aa, Artificial Sequence
  AAV capsid variant
MAADGYLPDWLEDNLSEGIREWWALKPGAPKPKANQQKQDDGRGLVLPGYKYLGPFNGLDKGEPVNAADAAALEHDKAYDQQLQAGDNPYLRYNHADAEFQERLQEDTSFGGNLGRAVFQAKKRVLEPLGLVEEGAKTAPGKKRPVEPSPQRSPDSSTGIGKKGQQPARKRLNFGQTGDSESVPDPQPLGEPPAAPSGVGPNTMAAGGGAPMADNNEGADGVGSSSGNWHCDSTWLGDRVITTSTRTWALPTYNNHLYKQISNGTSGGATNDNTYFGYSTPWGYFDFNRFHCHFSPRDWQRLINNNWGFRPKRLSFKLFNIQVKEVTQNEGTKTIANNLTSTIQVFTDSEYQLPYVLGSAHQGCLPPFPADVFMIPQYGYLTLNNGSQAVGRSSFYCLEYFPSQMLRTGNNFQFTYTFEDVPFHSSYAHSQSLDRLMNPLIDQYLYYLSRTQTTGGTANTQTLGFSQGGPNTMANQAKNWLPGPCYRQQRVSTYPLADTGTNFAWTAGTKYHLNGRNSLANPGIAMATHKDDEERFFPSNGILIFGKQNAARDNADYSDVMLTSEEEIKTTNPVATEEYGIVADNLQQQNTAPQIGTVNSQGALPGMVWQNRDVYLQGPIWAKIPHTDGNFHPSPLMGGFGLKHPPPQILIKNTPVPADPPTTFNQSKLNSFITQYSTGQVSVEIEWELQKENSKRWNPEIQYTSNYYKSTSVDFAVNTEGVYSEPRPIGTRYLTRNL

SEQ ID NO: 446 - protein, 738 aa, Artificial Sequence; identical to SEQ ID NO: 424
  AAV capsid variant

SEQ ID NO: 447 - protein, 737 aa, Artificial Sequence; identical to SEQ ID NO: 425
  AAV capsid variant

SEQ ID NO: 448 - protein, 737 aa, Artificial Sequence
  AAV capsid variant
MAADGYLPDWLEDNLSEGIREWWALKPGAPKPKANQQKQDDGRGLVLPGYKYLGPFNGLDKGEPVNAADAAALEHDKAYDQQLQAGDNPYLRYNHADAEFQERLQEDTSFGGNLGRAVFQAKKRVLEPLGLVEEGAKTAPGKKRPVEPSPQRSPDSSTGIGKKGQQPARKRLNFGQTGDSESVPDPQPLGEPPAAPSGVGPNTMAAGGGAPMADNNEGADGVGSSSGNWHCDSTWLGDRVITTSTRTWALPTYNNHLYKQISNGTSGGATNDNTYFGYSTPWGYFDFNRFHCHFSPRDWQRLINNNWGFRPKRLSFKLFNIQVKEVTQNEGTKTIANNLTSTIQVFTDSEYQLPYVLGSAHQGCLPPFPADVFMIPQYGYLTLNNGSQAVGRSSFYCLEYFPSQMLRTGNNFQFTYTFEDVPFHSSYAHSQSLDRLMNPLIDQYLYYLSRTQTTSNGRGVTLGFSQGGPNTMANQAKNWLPGPCYRQQRVSTYPLENFKYNFAWTAGTKYHLNGRNSLANPGIAMATHKDDEERFFPSNGILIFGKQNAARDNADYSDVMLTSEEEIKTTNPVATEEYGIVADNLQQQNTAPQIGTVNSQGALPGMVWQNRDVYLQGPIWAKIPHTDGNFHPSPLMGGFGLKHPPPQILIKNTPVPADPPTTFNQSKLNSFITQYSTGQVSVEIEWELQKENSKRWNPEIQYTSNYYKSTSVDFAVNTEGVYSEPRPIGTRYLTRNL

SEQ ID NO: 449 - protein, 737 aa, Artificial Sequence
  AAV capsid variant
MAADGYLPDWLEDNLSEGIREWWALKPGAPKPKANQQKQDDGRGLVLPGYKYLGPFNGLDKGEPVNAADAAALEHDKAYDQQLQAGDNPYLRYNHADAEFQERLQEDTSFGGNLGRAVFQAKKRVLEPLGLVEEGAKTAPGKKRPVEPSPQRSPDSSTGIGKKGQQPARKRLNFGQTGDSESVPDPQPLGEPPAAPSGVGPNTMAAGGGAPMADNNEGADGVGSSSGNWHCDSTWLGDRVITTSTRTWALPTYNNHLYKQISNGTSGGATNDNTYFGYSTPWGYFDFNRFHCHFSPRDWQRLINNNWGFRPKRLSFKLFNIQVKEVTQNEGTKTIANNLTSTIQVFTDSEYQLPYVLGSAHQGCLPPFPADVFMIPQYGYLTLNNGSQAVGRSSFYCLEYFPSQMLRTGNNFQFTYTFEDVPFHSSYAHSQSLDRLMNPLIDQYLYYLSRTQTTSNGRGVTLGFSQGGPNTMANQAKNWLPGPCYRQQRVSTYPLGDHSANFAWTAGTKYHLNGRNSLANPGIAMATHKDDEERFFPSNGILIFGKQNAARDNADYSDVMLTSEEEIKTTNPVATEEYGIVADNLQQQNTAPQIGTVNSQGALPGMVWQNRDVYLQGPIWAKIPHTDGNFHPSPLMGGFGLKHPPPQILIKNTPVPADPPTTFNQSKLNSFITQYSTGQVSVEIEWELQKENSKRWNPEIQYTSNYYKSTSVDFAVNTEGVYSEPRPIGTRYLTRNL

SEQ ID NO: 450 - protein, 737 aa, Artificial Sequence
  AAV capsid variant
MAADGYLPDWLEDNLSEGIREWWALKPGAPKPKANQQKQDDGRGLVLPGYKYLGPFNGLDKGEPVNAADAAALEHDKAYDQQLQAGDNPYLRYNHADAEFQERLQEDTSFGGNLGRAVFQAKKRVLEPLGLVEEGAKTAPGKKRPVEPSPQRSPDSSTGIGKKGQQPARKRLNFGQTGDSESVPDPQPLGEPPAAPSGVGPNTMAAGGGAPMADNNEGADGVGSSSGNWHCDSTWLGDRVITTSTRTWALPTYNNHLYKQISNGTSGGATNDNTYFGYSTPWGYFDFNRFHCHFSPRDWQRLINNNWGFRPKRLSFKLFNIQVKEVTQNEGTKTIANNLTSTIQVFTDSEYQLPYVLGSAHQGCLPPFPADVFMIPQYGYLTLNNGSQAVGRSSFYCLEYFPSQMLRTGNNFQFTYTFEDVPFHSSYAHSQSLDRLMNPLIDQYLYYLSRTQTTSNGRGVTLGFSQGGPNTMANQAKNWLPGPCYRQQRVSTYPLASGSGNFAWTAGTKYHLNGRNSLANPGIAMATHKDDEERFFPSNGILIFGKQNAARDNADYSDVMLTSEEEIKTTNPVATEEYGIVADNLQQQNTAPQIGTVNSQGALPGMVWQNRDVYLQGPIWAKIPHTDGNFHPSPLMGGFGLKHPPPQILIKNTPVPADPPTTFNQSKLNSFITQYSTGQVSVEIEWELQKENSKRWNPEIQYTSNYYKSTSVDFAVNTEGVYSEPRPIGTRYLTRNL

SEQ ID NO: 451 - protein, 737 aa, Artificial Sequence
  AAV capsid variant
MAADGYLPDWLEDNLSEGIREWWALKPGAPKPKANQQKQDDGRGLVLPGYKYLGPFNGLDKGEPVNAADAAALEHDKAYDQQLQAGDNPYLRYNHADAEFQERLQEDTSFGGNLGRAVFQAKKRVLEPLGLVEEGAKTAPGKKRPVEPSPQRSPDSSTGIGKKGQQPARKRLNFGQTGDSESVPDPQPLGEPPAAPSGVGPNTMAAGGGAPMADNNEGADGVGSSSGNWHCDSTWLGDRVITTSTRTWALPTYNNHLYKQISNGTSGGATNDNTYFGYSTPWGYFDFNRFHCHFSPRDWQRLINNNWGFRPKRLSFKLFNIQVKEVTQNEGTKTIANNLTSTIQVFTDSEYQLPYVLGSAHQGCLPPFPADVFMIPQYGYLTLNNGSQAVGRSSFYCLEYFPSQMLRTGNNFQFTYTFEDVPFHSSYAHSQSLDRLMNPLIDQYLYYLSRTQTTSNGRGVTLGFSQGGPNTMANQAKNWLPGPCYRQQRVSTYPLLGKEQNFAWTAGTKYHLNGRNSLANPGIAMATHKDDEERFFPSNGILIFGKQNAARDNADYSDVMLTSEEEIKTTNPVATEEYGIVADNLQQQNTAPQIGTVNSQGALPGMVWQNRDVYLQGPIWAKIPHTDGNFHPSPLMGGFGLKHPPPQILIKNTPVPADPPTTFNQSKLNSFITQYSTGQVSVEIEWELQKENSKRWNPEIQYTSNYYKSTSVDFAVNTEGVYSEPRPIGTRYLTRNL

SEQ ID NO: 452 - protein, 737 aa, Artificial Sequence
  AAV capsid variant
MAADGYLPDWLEDNLSEGIREWWALKPGAPKPKANQQKQDDGRGLVLPGYKYLGPFNGLDKGEPVNAADAAALEHDKAYDQQLQAGDNPYLRYNHADAEFQERLQEDTSFGGNLGRAVFQAKKRVLEPLGLVEEGAKTAPGKKRPVEPSPQRSPDSSTGIGKKGQQPARKRLNFGQTGDSESVPDPQPLGEPPAAPSGVGPNTMAAGGGAPMADNNEGADGVGSSSGNWHCDSTWLGDRVITTSTRTWALPTYNNHLYKQISNGTSGGATNDNTYFGYSTPWGYFDFNRFHCHFSPRDWQRLINNNWGFRPKRLSFKLFNIQVKEVTQNEGTKTIANNLTSTIQVFTDSEYQLPYVLGSAHQGCLPPFPADVFMIPQYGYLTLNNGSQAVGRSSFYCLEYFPSQMLRTGNNFQFTYTFEDVPFHSSYAHSQSLDRLMNPLIDQYLYYLSRTQTTSNGRGVTLGFSQGGPNTMANQAKNWLPGPCYRQQRVSTYPLSGTNQNFAWTAGTKYHLNGRNSLANPGIAMATHKDDEERFFPSNGILIFGKQNAARDNADYSDVMLTSEEEIKTTNPVATEEYGIVADNLQQQNTAPQIGTVNSQGALPGMVWQNRDVYLQGPIWAKIPHTDGNFHPSPLMGGFGLKHPPPQILIKNTPVPADPPTTFNQSKLNSFITQYSTGQVSVEIEWELQKENSKRWNPEIQYTSNYYKSTSVDFAVNTEGVYSEPRPIGTRYLTRNL

SEQ ID NO: 453 - protein, 737 aa, Artificial Sequence
  AAV capsid variant
MAADGYLPDWLEDNLSEGIREWWALKPGAPKPKANQQKQDDGRGLVLPGYKYLGPFNGLDKGEPVNAADAAALEHDKAYDQQLQAGDNPYLRYNHADAEFQERLQEDTSFGGNLGRAVFQAKKRVLEPLGLVEEGAKTAPGKKRPVEPSPQRSPDSSTGIGKKGQQPARKRLNFGQTGDSESVPDPQPLGEPPAAPSGVGPNTMAAGGGAPMADNNEGADGVGSSSGNWHCDSTWLGDRVITTSTRTWALPTYNNHLYKQISNGTSGGATNDNTYFGYSTPWGYFDFNRFHCHFSPRDWQRLINNNWGFRPKRLSFKLFNIQVKEVTQNEGTKTIANNLTSTIQVFTDSEYQLPYVLGSAHQGCLPPFPADVFMIPQYGYLTLNNGSQAVGRSSFYCLEYFPSQMLRTGNNFQFTYTFEDVPFHSSYAHSQSLDRLMNPLIDQYLYYLSRTQTTSNGRGVTLGFSQGGPNTMANQAKNWLPGPCYRQQRVSTYPLRDGQLNFAWTAGTKYHLNGRNSLANPGIAMATHKDDEERFFPSNGILIFGKQNAARDNADYSDVMLTSEEEIKTTNPVATEEYGIVADNLQQQNTAPQIGTVNSQGALPGMVWQNRDVYLQGPIWAKIPHTDGNFHPSPLMGGFGLKHPPPQILIKNTPVPADPPTTFNQSKLNSFITQYSTGQVSVEIEWELQKENSKRWNPEIQYTSNYYKSTSVDFAVNTEGVYSEPRPIGTRYLTRNL

SEQ ID NO: 454 - protein, 737 aa, Artificial Sequence
  AAV capsid variant
MAADGYLPDWLEDNLSEGIREWWALKPGAPKPKANQQKQDDGRGLVLPGYKYLGPFNGLDKGEPVNAADAAALEHDKAYDQQLQAGDNPYLRYNHADAEFQERLQEDTSFGGNLGRAVFQAKKRVLEPLGLVEEGAKTAPGKKRPVEPSPQRSPDSSTGIGKKGQQPARKRLNFGQTGDSESVPDPQPLGEPPAAPSGVGPNTMAAGGGAPMADNNEGADGVGSSSGNWHCDSTWLGDRVITTSTRTWALPTYNNHLYKQISNGTSGGATNDNTYFGYSTPWGYFDFNRFHCHFSPRDWQRLINNNWGFRPKRLSFKLFNIQVKEVTQNEGTKTIANNLTSTIQVFTDSEYQLPYVLGSAHQGCLPPFPADVFMIPQYGYLTLNNGSQAVGRSSFYCLEYFPSQMLRTGNNFQFTYTFEDVPFHSSYAHSQSLDRLMNPLIDQYLYYLSRTQTTSNGRGVTLGFSQGGPNTMANQAKNWLPGPCYRQQRVSTYPLADTGTNFAWTAGTKYHLNGRNSLANPGIAMATHKDDEERFFPSNGILIFGKQNAARDNADYSDVMLTSEEEIKTTNPVATEEYGIVADNLQQQNTAPQIGTVNSQGALPGMVWQNRDVYLQGPIWAKIPHTDGNFHPSPLMGGFGLKHPPPQILIKNTPVPADPPTTFNQSKLNSFITQYSTGQVSVEIEWELQKENSKRWNPEIQYTSNYYKSTSVDFAVNTEGVYSEPRPIGTRYLTRNL

SEQ ID NO: 455 - protein, 738 aa, Artificial Sequence
  AAV capsid variant
MAADGYLPDWLEDNLSEGIREWWALKPGAPKPKANQQKQDDGRGLVLPGYKYLGPFNGLDKGEPVNAADAAALEHDKAYDQQLQAGDNPYLRYNHADAEFQERLQEDTSFGGNLGRAVFQAKKRVLEPLGLVEEGAKTAPGKKRPVEPSPQRSPDSSTGIGKKGQQPARKRLNFGQTGDSESVPDPQPLGEPPAAPSGVGPNTMAAGGGAPMADNNEGADGVGSSSGNWHCDSTWLGDRVITTSTRTWALPTYNNHLYKQISNGTSGGATNDNTYFGYSTPWGYFDFNRFHCHFSPRDWQRLINNNWGFRPKRLSFKLFNIQVKEVTQNEGTKTIANNLTSTIQVFTDSEYQLPYVLGSAHQGCLPPFPADVFMIPQYGYLTLNNGSQAVGRSSFYCLEYFPSQMLRTGNNFQFTYTFEDVPFHSSYAHSQSLDRLMNPLIDQYLYYLSRTQTTGGTANTQTLGFSQGGPNTMANQAKNWLPGPCYRQQRVSTYPLENFKYNFAWTAGTKYHLNGRNSLANPGIAMATHKDDEERFFPSNGILIFGKQNAARDNADYSDVMLTSEEEIKTTNPVATEEYGIVADNVMEPTRAPQIGTVNSQGALPGMVWQNRDVYLQGPIWAKIPHTDGNFHPSPLMGGFGLKHPPPQILIKNTPVPADPPTTFNQSKLNSFITQYSTGQVSVEIEWELQKENSKRWNPEIQYTSNYYKSTSVDFAVNTEGVYSEPRPIGTRYLTRNL

SEQ ID NO: 456 - protein, 738 aa, Artificial Sequence
  AAV capsid variant
MAADGYLPDWLEDNLSEGIREWWALKPGAPKPKANQQKQDDGRGLVLPGYKYLGPFNGLDKGEPVNAADAAALEHDKAYDQQLQAGDNPYLRYNHADAEFQERLQEDTSFGGNLGRAVFQAKKRVLEPLGLVEEGAKTAPGKKRPVEPSPQRSPDSSTGIGKKGQQPARKRLNFGQTGDSESVPDPQPLGEPPAAPSGVGPNTMAAGGGAPMADNNEGADGVGSSSGNWHCDSTWLGDRVITTSTRTWALPTYNNHLYKQISNGTSGGATNDNTYFGYSTPWGYFDFNRFHCHFSPRDWQRLINNNWGFRPKRLSFKLFNIQVKEVTQNEGTKTIANNLTSTIQVFTDSEYQLPYVLGSAHQGCLPPFPADVFMIPQYGYLTLNNGSQAVGRSSFYCLEYFPSQMLRTGNNFQFTYTFEDVPFHSSYAHSQSLDRLMNPLIDQYLYYLSRTQTTGGTANTQTLGFSQGGPNTMANQAKNWLPGPCYRQQRVSTYPLGDHSANFAWTAGTKYHLNGRNSLANPGIAMATHKDDEERFFPSNGILIFGKQNAARDNADYSDVMLTSEEEIKTTNPVATEEYGIVADNVMEPTRAPQIGTVNSQGALPGMVWQNRDVYLQGPIWAKIPHTDGNFHPSPLMGGFGLKHPPPQILIKNTPVPADPPTTFNQSKLNSFITQYSTGQVSVEIEWELQKENSKRWNPEIQYTSNYYKSTSVDFAVNTEGVYSEPRPIGTRYLTRNL

SEQ ID NO: 457 - protein, 738 aa, Artificial Sequence
  AAV capsid variant
MAADGYLPDWLEDNLSEGIREWWALKPGAPKPKANQQKQDDGRGLVLPGYKYLGPFNGLDKGEPVNAADAAALEHDKAYDQQLQAGDNPYLRYNHADAEFQERLQEDTSFGGNLGRAVFQAKKRVLEPLGLVEEGAKTAPGKKRPVEPSPQRSPDSSTGIGKKGQQPARKRLNFGQTGDSESVPDPQPLGEPPAAPSGVGPNTMAAGGGAPMADNNEGADGVGSSSGNWHCDSTWLGDRVITTSTRTWALPTYNNHLYKQISNGTSGGATNDNTYFGYSTPWGYFDFNRFHCHFSPRDWQRLINNNWGFRPKRLSFKLFNIQVKEVTQNEGTKTIANNLTSTIQVFTDSEYQLPYVLGSAHQGCLPPFPADVFMIPQYGYLTLNNGSQAVGRSSFYCLEYFPSQMLRTGNNFQFTYTFEDVPFHSSYAHSQSLDRLMNPLIDQYLYYLSRTQTTGGTANTQTLGFSQGGPNTMANQAKNWLPGPCYRQQRVSTYPLASGSGNFAWTAGTKYHLNGRNSLANPGIAMATHKDDEERFFPSNGILIFGKQNAARDNADYSDVMLTSEEEIKTTNPVATEEYGIVADNVMEPTRAPQIGTVNSQGALPGMVWQNRDVYLQGPIWAKIPHTDGNFHPSPLMGGFGLKHPPPQILIKNTPVPADPPTTFNQSKLNSFITQYSTGQVSVEIEWELQKENSKRWNPEIQYTSNYYKSTSVDFAVNTEGVYSEPRPIGTRYLTRNL

SEQ ID NO: 458 - protein, 738 aa, Artificial Sequence
  AAV capsid variant
MAADGYLPDWLEDNLSEGIREWWALKPGAPKPKANQQKQDDGRGLVLPGYKYLGPFNGLDKGEPVNAADAAALEHDKAYDQQLQAGDNPYLRYNHADAEFQERLQEDTSFGGNLGRAVFQAKKRVLEPLGLVEEGAKTAPGKKRPVEPSPQRSPDSSTGIGKKGQQPARKRLNFGQTGDSESVPDPQPLGEPPAAPSGVGPNTMAAGGGAPMADNNEGADGVGSSSGNWHCDSTWLGDRVITTSTRTWALPTYNNHLYKQISNGTSGGATNDNTYFGYSTPWGYFDFNRFHCHFSPRDWQRLINNNWGFRPKRLSFKLFNIQVKEVTQNEGTKTIANNLTSTIQVFTDSEYQLPYVLGSAHQGCLPPFPADVFMIPQYGYLTLNNGSQAVGRSSFYCLEYFPSQMLRTGNNFQFTYTFEDVPFHSSYAHSQSLDRLMNPLIDQYLYYLSRTQTTGGTANTQTLGFSQGGPNTMANQAKNWLPGPCYRQQRVSTYPLLGKEQNFAWTAGTKYHLNGRNSLANPGIAMATHKDDEERFFPSNGILIFGKQNAARDNADYSDVMLTSEEEIKTTNPVATEEYGIVADNVMEPTRAPQIGTVNSQGALPGMVWQNRDVYLQGPIWAKIPHTDGNFHPSPLMGGFGLKHPPPQILIKNTPVPADPPTTFNQSKLNSFITQYSTGQVSVEIEWELQKENSKRWNPEIQYTSNYYKSTSVDFAVNTEGVYSEPRPIGTRYLTRNL

SEQ ID NO: 459 - protein, 738 aa, Artificial Sequence
  AAV capsid variant
MAADGYLPDWLEDNLSEGIREWWALKPGAPKPKANQQKQDDGRGLVLPGYKYLGPFNGLDKGEPVNAADAAALEHDKAYDQQLQAGDNPYLRYNHADAEFQERLQEDTSFGGNLGRAVFQAKKRVLEPLGLVEEGAKTAPGKKRPVEPSPQRSPDSSTGIGKKGQQPARKRLNFGQTGDSESVPDPQPLGEPPAAPSGVGPNTMAAGGGAPMADNNEGADGVGSSSGNWHCDSTWLGDRVITTSTRTWALPTYNNHLYKQISNGTSGGATNDNTYFGYSTPWGYFDFNRFHCHFSPRDWQRLINNNWGFRPKRLSFKLFNIQVKEVTQNEGTKTIANNLTSTIQVFTDSEYQLPYVLGSAHQGCLPPFPADVFMIPQYGYLTLNNGSQAVGRSSFYCLEYFPSQMLRTGNNFQFTYTFEDVPFHSSYAHSQSLDRLMNPLIDQYLYYLSRTQTTGGTANTQTLGFSQGGPNTMANQAKNWLPGPCYRQQRVSTYPLSGTNQNFAWTAGTKYHLNGRNSLANPGIAMATHKDDEERFFPSNGILIFGKQNAARDNADYSDVMLTSEEEIKTTNPVATEEYGIVADNVMEPTRAPQIGTVNSQGALPGMVWQNRDVYLQGPIWAKIPHTDGNFHPSPLMGGFGLKHPPPQILIKNTPVPADPPTTFNQSKLNSFITQYSTGQVSVEIEWELQKENSKRWNPEIQYTSNYYKSTSVDFAVNTEGVYSEPRPIGTRYLTRNL

SEQ ID NO: 460 - protein, 738 aa, Artificial Sequence
  AAV capsid variant
MAADGYLPDWLEDNLSEGIREWWALKPGAPKPKANQQKQDDGRGLVLPGYKYLGPFNGLDKGEPVNAADAAALEHDKAYDQQLQAGDNPYLRYNHADAEFQERLQEDTSFGGNLGRAVFQAKKRVLEPLGLVEEGAKTAPGKKRPVEPSPQRSPDSSTGIGKKGQQPARKRLNFGQTGDSESVPDPQPLGEPPAAPSGVGPNTMAAGGGAPMADNNEGADGVGSSSGNWHCDSTWLGDRVITTSTRTWALPTYNNHLYKQISNGTSGGATNDNTYFGYSTPWGYFDFNRFHCHFSPRDWQRLINNNWGFRPKRLSFKLFNIQVKEVTQNEGTKTIANNLTSTIQVFTDSEYQLPYVLGSAHQGCLPPFPADVFMIPQYGYLTLNNGSQAVGRSSFYCLEYFPSQMLRTGNNFQFTYTFEDVPFHSSYAHSQSLDRLMNPLIDQYLYYLSRTQTTGGTANTQTLGFSQGGPNTMANQAKNWLPGPCYRQQRVSTYPLRDGQLNFAWTAGTKYHLNGRNSLANPGIAMATHKDDEERFFPSNGILIFGKQNAARDNADYSDVMLTSEEEIKTTNPVATEEYGIVADNVMEPTRAPQIGTVNSQGALPGMVWQNRDVYLQGPIWAKIPHTDGNFHPSPLMGGFGLKHPPPQILIKNTPVPADPPTTFNQSKLNSFITQYSTGQVSVEIEWELQKENSKRWNPEIQYTSNYYKSTSVDFAVNTEGVYSEPRPIGTRYLTRNL

SEQ ID NO: 461 - protein, 738 aa, Artificial Sequence
  AAV capsid variant
MAADGYLPDWLEDNLSEGIREWWALKPGAPKPKANQQKQDDGRGLVLPGYKYLGPFNGLDKGEPVNAADAAALEHDKAYDQQLQAGDNPYLRYNHADAEFQERLQEDTSFGGNLGRAVFQAKKRVLEPLGLVEEGAKTAPGKKRPVEPSPQRSPDSSTGIGKKGQQPARKRLNFGQTGDSESVPDPQPLGEPPAAPSGVGPNTMAAGGGAPMADNNEGADGVGSSSGNWHCDSTWLGDRVITTSTRTWALPTYNNHLYKQISNGTSGGATNDNTYFGYSTPWGYFDFNRFHCHFSPRDWQRLINNNWGFRPKRLSFKLFNIQVKEVTQNEGTKTIANNLTSTIQVFTDSEYQLPYVLGSAHQGCLPPFPADVFMIPQYGYLTLNNGSQAVGRSSFYCLEYFPSQMLRTGNNFQFTYTFEDVPFHSSYAHSQSLDRLMNPLIDQYLYYLSRTQTTGGTANTQTLGFSQGGPNTMANQAKNWLPGPCYRQQRVSTYPLADTGTNFAWTAGTKYHLNGRNSLANPGIAMATHKDDEERFFPSNGILIFGKQNAARDNADYSDVMLTSEEEIKTTNPVATEEYGIVADNVMEPTRAPQIGTVNSQGALPGMVWQNRDVYLQGPIWAKIPHTDGNFHPSPLMGGFGLKHPPPQILIKNTPVPADPPTTFNQSKLNSFITQYSTGQVSVEIEWELQKENSKRWNPEIQYTSNYYKSTSVDFAVNTEGVYSEPRPIGTRYLTRNL

SEQ ID NO: 462 - protein, 737 aa, Artificial Sequence
  AAV capsid variant
MAADGYLPDWLEDNLSEGIREWWALKPGAPKPKANQQKQDDGRGLVLPGYKYLGPFNGLDKGEPVNAADAAALEHDKAYDQQLQAGDNPYLRYNHADAEFQERLQEDTSFGGNLGRAVFQAKKRVLEPLGLVEEGAKTAPGKKRPVEPSPQRSPDSSTGIGKKGQQPARKRLNFGQTGDSESVPDPQPLGEPPAAPSGVGPNTMAAGGGAPMADNNEGADGVGSSSGNWHCDSTWLGDRVITTSTRTWALPTYNNHLYKQISNGTSGGATNDNTYFGYSTPWGYFDFNRFHCHFSPRDWQRLINNNWGFRPKRLSFKLFNIQVKEVTQNEGTKTIANNLTSTIQVFTDSEYQLPYVLGSAHQGCLPPFPADVFMIPQYGYLTLNNGSQAVGRSSFYCLEYFPSQMLRTGNNFQFTYTFEDVPFHSSYAHSQSLDRLMNPLIDQYLYYLSRTQTTSNGRGVTLGFSQGGPNTMANQAKNWLPGPCYRQQRVSTYPLENFKYNFAWTAGTKYHLNGRNSLANPGIAMATHKDDEERFFPSNGILIFGKQNAARDNADYSDVMLTSEEEIKTTNPVATEEYGIVADNVMEPTRAPQIGTVNSQGALPGMVWQNRDVYLQGPIWAKIPHTDGNFHPSPLMGGFGLKHPPPQILIKNTPVPADPPTTFNQSKLNSFITQYSTGQVSVEIEWELQKENSKRWNPEIQYTSNYYKSTSVDFAVNTEGVYSEPRPIGTRYLTRNL

SEQ ID NO: 463 - protein, 737 aa, Artificial Sequence
  AAV capsid variant
MAADGYLPDWLEDNLSEGIREWWALKPGAPKPKANQQKQDDGRGLVLPGYKYLGPFNGLDKGEPVNAADAAALEHDKAYDQQLQAGDNPYLRYNHADAEFQERLQEDTSFGGNLGRAVFQAKKRVLEPLGLVEEGAKTAPGKKRPVEPSPQRSPDSSTGIGKKGQQPARKRLNFGQTGDSESVPDPQPLGEPPAAPSGVGPNTMAAGGGAPMADNNEGADGVGSSSGNWHCDSTWLGDRVITTSTRTWALPTYNNHLYKQISNGTSGGATNDNTYFGYSTPWGYFDFNRFHCHFSPRDWQRLINNNWGFRPKRLSFKLFNIQVKEVTQNEGTKTIANNLTSTIQVFTDSEYQLPYVLGSAHQGCLPPFPADVFMIPQYGYLTLNNGSQAVGRSSFYCLEYFPSQMLRTGNNFQFTYTFEDVPFHSSYAHSQSLDRLMNPLIDQYLYYLSRTQTTSNGRGVTLGFSQGGPNTMANQAKNWLPGPCYRQQRVSTYPLGDHSANFAWTAGTKYHLNGRNSLANPGIAMATHKDDEERFFPSNGILIFGKQNAARDNADYSDVMLTSEEEIKTTNPVATEEYGIVADNVMEPTRAPQIGTVNSQGALPGMVWQNRDVYLQGPIWAKIPHTDGNFHPSPLMGGFGLKHPPPQILIKNTPVPADPPTTFNQSKLNSFITQYSTGQVSVEIEWELQKENSKRWNPEIQYTSNYYKSTSVDFAVNTEGVYSEPRPIGTRYLTRNL

SEQ ID NO: 464 - protein, 737 aa, Artificial Sequence
  AAV capsid variant
MAADGYLPDWLEDNLSEGIREWWALKPGAPKPKANQQKQDDGRGLVLPGYKYLGPFNGLDKGEPVNAADAAALEHDKAYDQQLQAGDNPYLRYNHADAEFQERLQEDTSFGGNLGRAVFQAKKRVLEPLGLVEEGAKTAPGKKRPVEPSPQRSPDSSTGIGKKGQQPARKRLNFGQTGDSESVPDPQPLGEPPAAPSGVGPNTMAAGGGAPMADNNEGADGVGSSSGNWHCDSTWLGDRVITTSTRTWALPTYNNHLYKQISNGTSGGATNDNTYFGYSTPWGYFDFNRFHCHFSPRDWQRLINNNWGFRPKRLSFKLFNIQVKEVTQNEGTKTIANNLTSTIQVFTDSEYQLPYVLGSAHQGCLPPFPADVFMIPQYGYLTLNNGSQAVGRSSFYCLEYFPSQMLRTGNNFQFTYTFEDVPFHSSYAHSQSLDRLMNPLIDQYLYYLSRTQTTSNGRGVTLGFSQGGPNTMANQAKNWLPGPCYRQQRVSTYPLASGSGNFAWTAGTKYHLNGRNSLANPGIAMATHKDDEERFFPSNGILIFGKQNAARDNADYSDVMLTSEEEIKTTNPVATEEYGIVADNVMEPTRAPQIGTVNSQGALPGMVWQNRDVYLQGPIWAKIPHTDGNFHPSPLMGGFGLKHPPPQILIKNTPVPADPPTTFNQSKLNSFITQYSTGQVSVEIEWELQKENSKRWNPEIQYTSNYYKSTSVDFAVNTEGVYSEPRPIGTRYLTRNL

SEQ ID NO: 465 - protein, 737 aa, Artificial Sequence
  AAV capsid variant
MAADGYLPDWLEDNLSEGIREWWALKPGAPKPKANQQKQDDGRGLVLPGYKYLGPFNGLDKGEPVNAADAAALEHDKAYDQQLQAGDNPYLRYNHADAEFQERLQEDTSFGGNLGRAVFQAKKRVLEPLGLVEEGAKTAPGKKRPVEPSPQRSPDSSTGIGKKGQQPARKRLNFGQTGDSESVPDPQPLGEPPAAPSGVGPNTMAAGGGAPMADNNEGADGVGSSSGNWHCDSTWLGDRVITTSTRTWALPTYNNHLYKQISNGTSGGATNDNTYFGYSTPWGYFDFNRFHCHFSPRDWQRLINNNWGFRPKRLSFKLFNIQVKEVTQNEGTKTIANNLTSTIQVFTDSEYQLPYVLGSAHQGCLPPFPADVFMIPQYGYLTLNNGSQAVGRSSFYCLEYFPSQMLRTGNNFQFTYTFEDVPFHSSYAHSQSLDRLMNPLIDQYLYYLSRTQTTSNGRGVTLGFSQGGPNTMANQAKNWLPGPCYRQQRVSTYPLLGKEQNFAWTAGTKYHLNGRNSLANPGIAMATHKDDEERFFPSNGILIFGKQNAARDNADYSDVMLTSEEEIKTTNPVATEEYGIVADNVMEPTRAPQIGTVNSQGALPGMVWQNRDVYLQGPIWAKIPHTDGNFHPSPLMGGFGLKHPPPQILIKNTPVPADPPTTFNQSKLNSFITQYSTGQVSVEIEWELQKENSKRWNPEIQYTSNYYKSTSVDFAVNTEGVYSEPRPIGTRYLTRNL

SEQ ID NO: 466 - protein, 737 aa, Artificial Sequence
  AAV capsid variant
MAADGYLPDWLEDNLSEGIREWWALKPGAPKPKANQQKQDDGRGLVLPGYKYLGPFNGLDKGEPVNAADAAALEHDKAYDQQLQAGDNPYLRYNHADAEFQERLQEDTSFGGNLGRAVFQAKKRVLEPLGLVEEGAKTAPGKKRPVEPSPQRSPDSSTGIGKKGQQPARKRLNFGQTGDSESVPDPQPLGEPPAAPSGVGPNTMAAGGGAPMADNNEGADGVGSSSGNWHCDSTWLGDRVITTSTRTWALPTYNNHLYKQISNGTSGGATNDNTYFGYSTPWGYFDFNRFHCHFSPRDWQRLINNNWGFRPKRLSFKLFNIQVKEVTQNEGTKTIANNLTSTIQVFTDSEYQLPYVLGSAHQGCLPPFPADVFMIPQYGYLTLNNGSQAVGRSSFYCLEYFPSQMLRTGNNFQFTYTFEDVPFHSSYAHSQSLDRLMNPLIDQYLYYLSRTQTTSNGRGVTLGFSQGGPNTMANQAKNWLPGPCYRQQRVSTYPLSGTNQNFAWTAGTKYHLNGRNSLANPGIAMATHKDDEERFFPSNGILIFGKQNAARDNADYSDVMLTSEEEIKTTNPVATEEYGIVADNVMEPTRAPQIGTVNSQGALPGMVWQNRDVYLQGPIWAKIPHTDGNFHPSPLMGGFGLKHPPPQILIKNTPVPADPPTTFNQSKLNSFITQYSTGQVSVEIEWELQKENSKRWNPEIQYTSNYYKSTSVDFAVNTEGVYSEPRPIGTRYLTRNL

SEQ ID NO: 467 - protein, 737 aa, Artificial Sequence
  AAV capsid variant
MAADGYLPDWLEDNLSEGIREWWALKPGAPKPKANQQKQDDGRGLVLPGYKYLGPFNGLDKGEPVNAADAAALEHDKAYDQQLQAGDNPYLRYNHADAEFQERLQEDTSFGGNLGRAVFQAKKRVLEPLGLVEEGAKTAPGKKRPVEPSPQRSPDSSTGIGKKGQQPARKRLNFGQTGDSESVPDPQPLGEPPAAPSGVGPNTMAAGGGAPMADNNEGADGVGSSSGNWHCDSTWLGDRVITTSTRTWALPTYNNHLYKQISNGTSGGATNDNTYFGYSTPWGYFDFNRFHCHFSPRDWQRLINNNWGFRPKRLSFKLFNIQVKEVTQNEGTKTIANNLTSTIQVFTDSEYQLPYVLGSAHQGCLPPFPADVFMIPQYGYLTLNNGSQAVGRSSFYCLEYFPSQMLRTGNNFQFTYTFEDVPFHSSYAHSQSLDRLMNPLIDQYLYYLSRTQTTSNGRGVTLGFSQGGPNTMANQAKNWLPGPCYRQQRVSTYPLRDGQLNFAWTAGTKYHLNGRNSLANPGIAMATHKDDEERFFPSNGILIFGKQNAARDNADYSDVMLTSEEEIKTTNPVATEEYGIVADNVMEPTRAPQIGTVNSQGALPGMVWQNRDVYLQGPIWAKIPHTDGNFHPSPLMGGFGLKHPPPQILIKNTPVPADPPTTFNQSKLNSFITQYSTGQVSVEIEWELQKENSKRWNPEIQYTSNYYKSTSVDFAVNTEGVYSEPRPIGTRYLTRNL

SEQ ID NO: 468 - protein, 737 aa, Artificial Sequence
  AAV capsid variant
MAADGYLPDWLEDNLSEGIREWWALKPGAPKPKANQQKQDDGRGLVLPGYKYLGPFNGLDKGEPVNAADAAALEHDKAYDQQLQAGDNPYLRYNHADAEFQERLQEDTSFGGNLGRAVFQAKKRVLEPLGLVEEGAKTAPGKKRPVEPSPQRSPDSSTGIGKKGQQPARKRLNFGQTGDSESVPDPQPLGEPPAAPSGVGPNTMAAGGGAPMADNNEGADGVGSSSGNWHCDSTWLGDRVITTSTRTWALPTYNNHLYKQISNGTSGGATNDNTYFGYSTPWGYFDFNRFHCHFSPRDWQRLINNNWGFRPKRLSFKLFNIQVKEVTQNEGTKTIANNLTSTIQVFTDSEYQLPYVLGSAHQGCLPPFPADVFMIPQYGYLTLNNGSQAVGRSSFYCLEYFPSQMLRTGNNFQFTYTFEDVPFHSSYAHSQSLDRLMNPLIDQYLYYLSRTQTTSNGRGVTLGFSQGGPNTMANQAKNWLPGPCYRQQRVSTYPLADTGTNFAWTAGTKYHLNGRNSLANPGIAMATHKDDEERFFPSNGILIFGKQNAARDNADYSDVMLTSEEEIKTTNPVATEEYGIVADNVMEPTRAPQIGTVNSQGALPGMVWQNRDVYLQGPIWAKIPHTDGNFHPSPLMGGFGLKHPPPQILIKNTPVPADPPTTFNQSKLNSFITQYSTGQVSVEIEWELQKENSKRWNPEIQYTSNYYKSTSVDFAVNTEGVYSEPRPIGTRYLTRNL

SEQ ID NO: 469 - protein, 737 aa, Artificial Sequence; identical to SEQ ID NO: 426
  AAV capsid variant

SEQ ID NO: 470 - protein, 736 aa, Artificial Sequence; identical to SEQ ID NO: 427
  AAV capsid variant

SEQ ID NO: 471 - protein, 737 aa, Artificial Sequence
  AAV capsid variant
MAADGYLPDWLEDNLSEGIREWWALKPGAPQPKANQQHQDNARGLVLPGYKYLGPGNGLDKGEPVNAADAAALEHDKAYDQQLKAGDNPYLKYNHADAEFQERLKEDTSFGGNLGRAVFQAKKRLLEPLGLVEEAAKTAPGKKRPVEQSPQEPDSSAGIGKSGAQPAKKRLNFGQTGDSESVPDPQPLGEPPAAPSGVGPNTMAAGGGAPMADNNEGADGVGSSSGNWHCDSTWLGDRVITTSTRTWALPTYNNHLYKQISNGTSGGATNDNTYFGYSTPWGYFDFNRFHCHFSPRDWQRLINNNWGFRPKRLSFKLFNIQVKEVTQNEGTKTIANNLTSTIQVFTDSEYQLPYVLGSAHQGCLPPFPADVFMIPQYGYLTLNNGSQAVGRSSFYCLEYFPSQMLRTGNNFQFTYTFEDVPFHSSYAHSQSLDRLMNPLIDQYLYYLSRTQTTGGTANTQTLGFSQGGPNTMANQAKNWLPGPCYRQQRVSTYPLENFKYNFAWTAGTKYHLNGRNSLANPGIAMATHKDDEERFFPSNGILIFGKQNAARDNADYSDVMLTSEEEIKTTNPVATEEYGIVADNLQQQNTAPQIGTVNSQGALPGMVWQNRDVYLQGPIWAKIPHTDGNFHPSPLMGGFGLKHPPPQILIKNTPVPADPPTTFNQSKLNSFITQYSTGQVSVEIEWELQKENSKRWNPEIQYTSNYYKSTSVDFAVNTEGVYSEPRPIGTRYLTRNL

SEQ ID NO: 472 - protein, 737 aa, Artificial Sequence
  AAV capsid variant
MAADGYLPDWLEDNLSEGIREWWALKPGAPQPKANQQHQDNARGLVLPGYKYLGPGNGLDKGEPVNAADAAALEHDKAYDQQLKAGDNPYLKYNHADAEFQERLKEDTSFGGNLGRAVFQAKKRLLEPLGLVEEAAKTAPGKKRPVEQSPQEPDSSAGIGKSGAQPAKKRLNFGQTGDSESVPDPQPLGEPPAAPSGVGPNTMAAGGGAPMADNNEGADGVGSSSGNWHCDSTWLGDRVITTSTRTWALPTYNNHLYKQISNGTSGGATNDNTYFGYSTPWGYFDFNRFHCHFSPRDWQRLINNNWGFRPKRLSFKLFNIQVKEVTQNEGTKTIANNLTSTIQVFTDSEYQLPYVLGSAHQGCLPPFPADVFMIPQYGYLTLNNGSQAVGRSSFYCLEYFPSQMLRTGNNFQFTYTFEDVPFHSSYAHSQSLDRLMNPLIDQYLYYLSRTQTTGGTANTQTLGFSQGGPNTMANQAKNWLPGPCYRQQRVSTYPLGDHSANFAWTAGTKYHLNGRNSLANPGIAMATHKDDEERFFPSNGILIFGKQNAARDNADYSDVMLTSEEEIKTTNPVATEEYGIVADNLQQQNTAPQIGTVNSQGALPGMVWQNRDVYLQGPIWAKIPHTDGNFHPSPLMGGFGLKHPPPQILIKNTPVPADPPTTFNQSKLNSFITQYSTGQVSVEIEWELQKENSKRWNPEIQYTSNYYKSTSVDFAVNTEGVYSEPRPIGTRYLTRNL

SEQ ID NO: 473 - protein, 737 aa, Artificial Sequence
  AAV capsid variant
MAADGYLPDWLEDNLSEGIREWWALKPGAPQPKANQQHQDNARGLVLPGYKYLGPGNGLDKGEPVNAADAAALEHDKAYDQQLKAGDNPYLKYNHADAEFQERLKEDTSFGGNLGRAVFQAKKRLLEPLGLVEEAAKTAPGKKRPVEQSPQEPDSSAGIGKSGAQPAKKRLNFGQTGDSESVPDPQPLGEPPAAPSGVGPNTMAAGGGAPMADNNEGADGVGSSSGNWHCDSTWLGDRVITTSTRTWALPTYNNHLYKQISNGTSGGATNDNTYFGYSTPWGYFDFNRFHCHFSPRDWQRLINNNWGFRPKRLSFKLFNIQVKEVTQNEGTKTIANNLTSTIQVFTDSEYQLPYVLGSAHQGCLPPFPADVFMIPQYGYLTLNNGSQAVGRSSFYCLEYFPSQMLRTGNNFQFTYTFEDVPFHSSYAHSQSLDRLMNPLIDQYLYYLSRTQTTGGTANTQTLGFSQGGPNTMANQAKNWLPGPCYRQQRVSTYPLASGSGNFAWTAGTKYHLNGRNSLANPGIAMATHKDDEERFFPSNGILIFGKQNAARDNADYSDVMLTSEEEIKTTNPVATEEYGIVADNLQQQNTAPQIGTVNSQGALPGMVWQNRDVYLQGPIWAKIPHTDGNFHPSPLMGGFGLKHPPPQILIKNTPVPADPPTTFNQSKLNSFITQYSTGQVSVEIEWELQKENSKRWNPEIQYTSNYYKSTSVDFAVNTEGVYSEPRPIGTRYLTRNL

SEQ ID NO: 474 - protein, 737 aa, Artificial Sequence
  AAV capsid variant
MAADGYLPDWLEDNLSEGIREWWALKPGAPQPKANQQHQDNARGLVLPGYKYLGPGNGLDKGEPVNAADAAALEHDKAYDQQLKAGDNPYLKYNHADAEFQERLKEDTSFGGNLGRAVFQAKKRLLEPLGLVEEAAKTAPGKKRPVEQSPQEPDSSAGIGKSGAQPAKKRLNFGQTGDSESVPDPQPLGEPPAAPSGVGPNTMAAGGGAPMADNNEGADGVGSSSGNWHCDSTWLGDRVITTSTRTWALPTYNNHLYKQISNGTSGGATNDNTYFGYSTPWGYFDFNRFHCHFSPRDWQRLINNNWGFRPKRLSFKLFNIQVKEVTQNEGTKTIANNLTSTIQVFTDSEYQLPYVLGSAHQGCLPPFPADVFMIPQYGYLTLNNGSQAVGRSSFYCLEYFPSQMLRTGNNFQFTYTFEDVPFHSSYAHSQSLDRLMNPLIDQYLYYLSRTQTTGGTANTQTLGFSQGGPNTMANQAKNWLPGPCYRQQRVSTYPLLGKEQNFAWTAGTKYHLNGRNSLANPGIAMATHKDDEERFFPSNGILIFGKQNAARDNADYSDVMLTSEEEIKTTNPVATEEYGIVADNLQQQNTAPQIGTVNSQGALPGMVWQNRDVYLQGPIWAKIPHTDGNFHPSPLMGGFGLKHPPPQILIKNTPVPADPPTTFNQSKLNSFITQYSTGQVSVEIEWELQKENSKRWNPEIQYTSNYYKSTSVDFAVNTEGVYSEPRPIGTRYLTRNL

SEQ ID NO: 475 - protein, 737 aa, Artificial Sequence
  AAV capsid variant
MAADGYLPDWLEDNLSEGIREWWALKPGAPQPKANQQHQDNARGLVLPGYKYLGPGNGLDKGEPVNAADAAALEHDKAYDQQLKAGDNPYLKYNHADAEFQERLKEDTSFGGNLGRAVFQAKKRLLEPLGLVEEAAKTAPGKKRPVEQSPQEPDSSAGIGKSGAQPAKKRLNFGQTGDSESVPDPQPLGEPPAAPSGVGPNTMAAGGGAPMADNNEGADGVGSSSGNWHCDSTWLGDRVITTSTRTWALPTYNNHLYKQISNGTSGGATNDNTYFGYSTPWGYFDFNRFHCHFSPRDWQRLINNNWGFRPKRLSFKLFNIQVKEVTQNEGTKTIANNLTSTIQVFTDSEYQLPYVLGSAHQGCLPPFPADVFMIPQYGYLTLNNGSQAVGRSSFYCLEYFPSQMLRTGNNFQFTYTFEDVPFHSSYAHSQSLDRLMNPLIDQYLYYLSRTQTTGGTANTQTLGFSQGGPNTMANQAKNWLPGPCYRQQRVSTYPLSGTNQNFAWTAGTKYHLNGRNSLANPGIAMATHKDDEERFFPSNGILIFGKQNAARDNADYSDVMLTSEEEIKTTNPVATEEYGIVADNLQQQNTAPQIGTVNSQGALPGMVWQNRDVYLQGPIWAKIPHTDGNFHPSPLMGGFGLKHPPPQILIKNTPVPADPPTTFNQSKLNSFITQYSTGQVSVEIEWELQKENSKRWNPEIQYTSNYYKSTSVDFAVNTEGVYSEPRPIGTRYLTRNL

SEQ ID NO: 476 - protein, 737 aa, Artificial Sequence
  AAV capsid variant
MAADGYLPDWLEDNLSEGIREWWALKPGAPQPKANQQHQDNARGLVLPGYKYLGPGNGLDKGEPVNAADAAALEHDKAYDQQLKAGDNPYLKYNHADAEFQERLKEDTSFGGNLGRAVFQAKKRLLEPLGLVEEAAKTAPGKKRPVEQSPQEPDSSAGIGKSGAQPAKKRLNFGQTGDSESVPDPQPLGEPPAAPSGVGPNTMAAGGGAPMADNNEGADGVGSSSGNWHCDSTWLGDRVITTSTRTWALPTYNNHLYKQISNGTSGGATNDNTYFGYSTPWGYFDFNRFHCHFSPRDWQRLINNNWGFRPKRLSFKLFNIQVKEVTQNEGTKTIANNLTSTIQVFTDSEYQLPYVLGSAHQGCLPPFPADVFMIPQYGYLTLNNGSQAVGRSSFYCLEYFPSQMLRTGNNFQFTYTFEDVPFHSSYAHSQSLDRLMNPLIDQYLYYLSRTQTTGGTANTQTLGFSQGGPNTMANQAKNWLPGPCYRQQRVSTYPLRDGQLNFAWTAGTKYHLNGRNSLANPGIAMATHKDDEERFFPSNGILIFGKQNAARDNADYSDVMLTSEEEIKTTNPVATEEYGIVADNLQQQNTAPQIGTVNSQGALPGMVWQNRDVYLQGPIWAKIPHTDGNFHPSPLMGGFGLKHPPPQILIKNTPVPADPPTTFNQSKLNSFITQYSTGQVSVEIEWELQKENSKRWNPEIQYTSNYYKSTSVDFAVNTEGVYSEPRPIGTRYLTRNL

SEQ ID NO: 477 - protein, 737 aa, Artificial Sequence
  AAV capsid variant
MAADGYLPDWLEDNLSEGIREWWALKPGAPQPKANQQHQDNARGLVLPGYKYLGPGNGLDKGEPVNAADAAALEHDKAYDQQLKAGDNPYLKYNHADAEFQERLKEDTSFGGNLGRAVFQAKKRLLEPLGLVEEAAKTAPGKKRPVEQSPQEPDSSAGIGKSGAQPAKKRLNFGQTGDSESVPDPQPLGEPPAAPSGVGPNTMAAGGGAPMADNNEGADGVGSSSGNWHCDSTWLGDRVITTSTRTWALPTYNNHLYKQISNGTSGGATNDNTYFGYSTPWGYFDFNRFHCHFSPRDWQRLINNNWGFRPKRLSFKLFNIQVKEVTQNEGTKTIANNLTSTIQVFTDSEYQLPYVLGSAHQGCLPPFPADVFMIPQYGYLTLNNGSQAVGRSSFYCLEYFPSQMLRTGNNFQFTYTFEDVPFHSSYAHSQSLDRLMNPLIDQYLYYLSRTQTTGGTANTQTLGFSQGGPNTMANQAKNWLPGPCYRQQRVSTYPLADTGTNFAWTAGTKYHLNGRNSLANPGIAMATHKDDEERFFPSNGILIFGKQNAARDNADYSDVMLTSEEEIKTTNPVATEEYGIVADNLQQQNTAPQIGTVNSQGALPGMVWQNRDVYLQGPIWAKIPHTDGNFHPSPLMGGFGLKHPPPQILIKNTPVPADPPTTFNQSKLNSFITQYSTGQVSVEIEWELQKENSKRWNPEIQYTSNYYKSTSVDFAVNTEGVYSEPRPIGTRYLTRNL

SEQ ID NO: 478 - protein, 737 aa, Artificial Sequence; identical to SEQ ID NO: 428
  AAV capsid variant

SEQ ID NO: 479 - protein, 736 aa, Artificial Sequence; identical to SEQ ID NO: 429
  AAV capsid variant

SEQ ID NO: 480 - protein, 736 aa, Artificial Sequence
  AAV capsid variant
MAADGYLPDWLEDNLSEGIREWWALKPGAPQPKANQQHQDNARGLVLPGYKYLGPGNGLDKGEPVNAADAAALEHDKAYDQQLKAGDNPYLKYNHADAEFQERLKEDTSFGGNLGRAVFQAKKRLLEPLGLVEEAAKTAPGKKRPVEQSPQEPDSSAGIGKSGAQPAKKRLNFGQTGDSESVPDPQPLGEPPAAPSGVGPNTMAAGGGAPMADNNEGADGVGSSSGNWHCDSTWLGDRVITTSTRTWALPTYNNHLYKQISNGTSGGATNDNTYFGYSTPWGYFDFNRFHCHFSPRDWQRLINNNWGFRPKRLSFKLFNIQVKEVTQNEGTKTIANNLTSTIQVFTDSEYQLPYVLGSAHQGCLPPFPADVFMIPQYGYLTLNNGSQAVGRSSFYCLEYFPSQMLRTGNNFQFTYTFEDVPFHSSYAHSQSLDRLMNPLIDQYLYYLSRTQTTSNGRGVTLGFSQGGPNTMANQAKNWLPGPCYRQQRVSTYPLENFKYNFAWTAGTKYHLNGRNSLANPGIAMATHKDDEERFFPSNGILIFGKQNAARDNADYSDVMLTSEEEIKTTNPVATEEYGIVADNLQQQNTAPQIGTVNSQGALPGMVWQNRDVYLQGPIWAKIPHTDGNFHPSPLMGGFGLKHPPPQILIKNTPVPADPPTTFNQSKLNSFITQYSTGQVSVEIEWELQKENSKRWNPEIQYTSNYYKSTSVDFAVNTEGVYSEPRPIGTRYLTRNL

SEQ ID NO: 481 - protein, 736 aa, Artificial Sequence
  AAV capsid variant
MAADGYLPDWLEDNLSEGIREWWALKPGAPQPKANQQHQDNARGLVLPGYKYLGPGNGLDKGEPVNAADAAALEHDKAYDQQLKAGDNPYLKYNHADAEFQERLKEDTSFGGNLGRAVFQAKKRLLEPLGLVEEAAKTAPGKKRPVEQSPQEPDSSAGIGKSGAQPAKKRLNFGQTGDSESVPDPQPLGEPPAAPSGVGPNTMAAGGGAPMADNNEGADGVGSSSGNWHCDSTWLGDRVITTSTRTWALPTYNNHLYKQISNGTSGGATNDNTYFGYSTPWGYFDFNRFHCHFSPRDWQRLINNNWGFRPKRLSFKLFNIQVKEVTQNEGTKTIANNLTSTIQVFTDSEYQLPYVLGSAHQGCLPPFPADVFMIPQYGYLTLNNGSQAVGRSSFYCLEYFPSQMLRTGNNFQFTYTFEDVPFHSSYAHSQSLDRLMNPLIDQYLYYLSRTQTTSNGRGVTLGFSQGGPNTMANQAKNWLPGPCYRQQRVSTYPLGDHSANFAWTAGTKYHLNGRNSLANPGIAMATHKDDEERFFPSNGILIFGKQNAARDNADYSDVMLTSEEEIKTTNPVATEEYGIVADNLQQQNTAPQIGTVNSQGALPGMVWQNRDVYLQGPIWAKIPHTDGNFHPSPLMGGFGLKHPPPQILIKNTPVPADPPTTFNQSKLNSFITQYSTGQVSVEIEWELQKENSKRWNPEIQYTSNYYKSTSVDFAVNTEGVYSEPRPIGTRYLTRNL

SEQ ID NO: 482 - protein, 736 aa, Artificial Sequence
  AAV capsid variant
MAADGYLPDWLEDNLSEGIREWWALKPGAPQPKANQQHQDNARGLVLPGYKYLGPGNGLDKGEPVNAADAAALEHDKAYDQQLKAGDNPYLKYNHADAEFQERLKEDTSFGGNLGRAVFQAKKRLLEPLGLVEEAAKTAPGKKRPVEQSPQEPDSSAGIGKSGAQPAKKRLNFGQTGDSESVPDPQPLGEPPAAPSGVGPNTMAAGGGAPMADNNEGADGVGSSSGNWHCDSTWLGDRVITTSTRTWALPTYNNHLYKQISNGTSGGATNDNTYFGYSTPWGYFDFNRFHCHFSPRDWQRLINNNWGFRPKRLSFKLFNIQVKEVTQNEGTKTIANNLTSTIQVFTDSEYQLPYVLGSAHQGCLPPFPADVFMIPQYGYLTLNNGSQAVGRSSFYCLEYFPSQMLRTGNNFQFTYTFEDVPFHSSYAHSQSLDRLMNPLIDQYLYYLSRTQTTSNGRGVTLGFSQGGPNTMANQAKNWLPGPCYRQQRVSTYPLASGSGNFAWTAGTKYHLNGRNSLANPGIAMATHKDDEERFFPSNGILIFGKQNAARDNADYSDVMLTSEEEIKTTNPVATEEYGIVADNLQQQNTAPQIGTVNSQGALPGMVWQNRDVYLQGPIWAKIPHTDGNFHPSPLMGGFGLKHPPPQILIKNTPVPADPPTTFNQSKLNSFITQYSTGQVSVEIEWELQKENSKRWNPEIQYTSNYYKSTSVDFAVNTEGVYSEPRPIGTRYLTRNL

SEQ ID NO: 483 - protein, 736 aa, Artificial Sequence
  AAV capsid variant
MAADGYLPDWLEDNLSEGIREWWALKPGAPQPKANQQHQDNARGLVLPGYKYLGPGNGLDKGEPVNAADAAALEHDKAYDQQLKAGDNPYLKYNHADAEFQERLKEDTSFGGNLGRAVFQAKKRLLEPLGLVEEAAKTAPGKKRPVEQSPQEPDSSAGIGKSGAQPAKKRLNFGQTGDSESVPDPQPLGEPPAAPSGVGPNTMAAGGGAPMADNNEGADGVGSSSGNWHCDSTWLGDRVITTSTRTWALPTYNNHLYKQISNGTSGGATNDNTYFGYSTPWGYFDFNRFHCHFSPRDWQRLINNNWGFRPKRLSFKLFNIQVKEVTQNEGTKTIANNLTSTIQVFTDSEYQLPYVLGSAHQGCLPPFPADVFMIPQYGYLTLNNGSQAVGRSSFYCLEYFPSQMLRTGNNFQFTYTFEDVPFHSSYAHSQSLDRLMNPLIDQYLYYLSRTQTTSNGRGVTLGFSQGGPNTMANQAKNWLPGPCYRQQRVSTYPLLGKEQNFAWTAGTKYHLNGRNSLANPGIAMATHKDDEERFFPSNGILIFGKQNAARDNADYSDVMLTSEEEIKTTNPVATEEYGIVADNLQQQNTAPQIGTVNSQGALPGMVWQNRDVYLQGPIWAKIPHTDGNFHPSPLMGGFGLKHPPPQILIKNTPVPADPPTTFNQSKLNSFITQYSTGQVSVEIEWELQKENSKRWNPEIQYTSNYYKSTSVDFAVNTEGVYSEPRPIGTRYLTRNL

SEQ ID NO: 484 - protein, 736 aa, Artificial Sequence
  AAV capsid variant
MAADGYLPDWLEDNLSEGIREWWALKPGAPQPKANQQHQDNARGLVLPGYKYLGPGNGLDKGEPVNAADAAALEHDKAYDQQLKAGDNPYLKYNHADAEFQERLKEDTSFGGNLGRAVFQAKKRLLEPLGLVEEAAKTAPGKKRPVEQSPQEPDSSAGIGKSGAQPAKKRLNFGQTGDSESVPDPQPLGEPPAAPSGVGPNTMAAGGGAPMADNNEGADGVGSSSGNWHCDSTWLGDRVITTSTRTWALPTYNNHLYKQISNGTSGGATNDNTYFGYSTPWGYFDFNRFHCHFSPRDWQRLINNNWGFRPKRLSFKLFNIQVKEVTQNEGTKTIANNLTSTIQVFTDSEYQLPYVLGSAHQGCLPPFPADVFMIPQYGYLTLNNGSQAVGRSSFYCLEYFPSQMLRTGNNFQFTYTFEDVPFHSSYAHSQSLDRLMNPLIDQYLYYLSRTQTTSNGRGVTLGFSQGGPNTMANQAKNWLPGPCYRQQRVSTYPLSGTNQNFAWTAGTKYHLNGRNSLANPGIAMATHKDDEERFFPSNGILIFGKQNAARDNADYSDVMLTSEEEIKTTNPVATEEYGIVADNLQQQNTAPQIGTVNSQGALPGMVWQNRDVYLQGPIWAKIPHTDGNFHPSPLMGGFGLKHPPPQILIKNTPVPADPPTTFNQSKLNSFITQYSTGQVSVEIEWELQKENSKRWNPEIQYTSNYYKSTSVDFAVNTEGVYSEPRPIGTRYLTRNL

SEQ ID NO: 485 - protein, 736 aa, Artificial Sequence
  AAV capsid variant
MAADGYLPDWLEDNLSEGIREWWALKPGAPQPKANQQHQDNARGLVLPGYKYLGPGNGLDKGEPVNAADAAALEHDKAYDQQLKAGDNPYLKYNHADAEFQERLKEDTSFGGNLGRAVFQAKKRLLEPLGLVEEAAKTAPGKKRPVEQSPQEPDSSAGIGKSGAQPAKKRLNFGQTGDSESVPDPQPLGEPPAAPSGVGPNTMAAGGGAPMADNNEGADGVGSSSGNWHCDSTWLGDRVITTSTRTWALPTYNNHLYKQISNGTSGGATNDNTYFGYSTPWGYFDFNRFHCHFSPRDWQRLINNNWGFRPKRLSFKLFNIQVKEVTQNEGTKTIANNLTSTIQVFTDSEYQLPYVLGSAHQGCLPPFPADVFMIPQYGYLTLNNGSQAVGRSSFYCLEYFPSQMLRTGNNFQFTYTFEDVPFHSSYAHSQSLDRLMNPLIDQYLYYLSRTQTTSNGRGVTLGFSQGGPNTMANQAKNWLPGPCYRQQRVSTYPLRDGQLNFAWTAGTKYHLNGRNSLANPGIAMATHKDDEERFFPSNGILIFGKQNAARDNADYSDVMLTSEEEIKTTNPVATEEYGIVADNLQQQNTAPQIGTVNSQGALPGMVWQNRDVYLQGPIWAKIPHTDGNFHPSPLMGGFGLKHPPPQILIKNTPVPADPPTTFNQSKLNSFITQYSTGQVSVEIEWELQKENSKRWNPEIQYTSNYYKSTSVDFAVNTEGVYSEPRPIGTRYLTRNL

SEQ ID NO: 486 - protein, 736 aa, Artificial Sequence
  AAV capsid variant
MAADGYLPDWLEDNLSEGIREWWALKPGAPQPKANQQHQDNARGLVLPGYKYLGPGNGLDKGEPVNAADAAALEHDKAYDQQLKAGDNPYLKYNHADAEFQERLKEDTSFGGNLGRAVFQAKKRLLEPLGLVEEAAKTAPGKKRPVEQSPQEPDSSAGIGKSGAQPAKKRLNFGQTGDSESVPDPQPLGEPPAAPSGVGPNTMAAGGGAPMADNNEGADGVGSSSGNWHCDSTWLGDRVITTSTRTWALPTYNNHLYKQISNGTSGGATNDNTYFGYSTPWGYFDFNRFHCHFSPRDWQRLINNNWGFRPKRLSFKLFNIQVKEVTQNEGTKTIANNLTSTIQVFTDSEYQLPYVLGSAHQGCLPPFPADVFMIPQYGYLTLNNGSQAVGRSSFYCLEYFPSQMLRTGNNFQFTYTFEDVPFHSSYAHSQSLDRLMNPLIDQYLYYLSRTQTTSNGRGVTLGFSQGGPNTMANQAKNWLPGPCYRQQRVSTYPLADTGTNFAWTAGTKYHLNGRNSLANPGIAMATHKDDEERFFPSNGILIFGKQNAARDNADYSDVMLTSEEEIKTTNPVATEEYGIVADNLQQQNTAPQIGTVNSQGALPGMVWQNRDVYLQGPIWAKIPHTDGNFHPSPLMGGFGLKHPPPQILIKNTPVPADPPTTFNQSKLNSFITQYSTGQVSVEIEWELQKENSKRWNPEIQYTSNYYKSTSVDFAVNTEGVYSEPRPIGTRYLTRNL

SEQ ID NO: 487 - protein, 737 aa, Artificial Sequence
  AAV capsid variant
MAADGYLPDWLEDNLSEGIREWWALKPGAPQPKANQQHQDNARGLVLPGYKYLGPGNGLDKGEPVNAADAAALEHDKAYDQQLKAGDNPYLKYNHADAEFQERLKEDTSFGGNLGRAVFQAKKRLLEPLGLVEEAAKTAPGKKRPVEQSPQEPDSSAGIGKSGAQPAKKRLNFGQTGDSESVPDPQPLGEPPAAPSGVGPNTMAAGGGAPMADNNEGADGVGSSSGNWHCDSTWLGDRVITTSTRTWALPTYNNHLYKQISNGTSGGATNDNTYFGYSTPWGYFDFNRFHCHFSPRDWQRLINNNWGFRPKRLSFKLFNIQVKEVTQNEGTKTIANNLTSTIQVFTDSEYQLPYVLGSAHQGCLPPFPADVFMIPQYGYLTLNNGSQAVGRSSFYCLEYFPSQMLRTGNNFQFTYTFEDVPFHSSYAHSQSLDRLMNPLIDQYLYYLSRTQTTGGTANTQTLGFSQGGPNTMANQAKNWLPGPCYRQQRVSTYPLENFKYNFAWTAGTKYHLNGRNSLANPGIAMATHKDDEERFFPSNGILIFGKQNAARDNADYSDVMLTSEEEIKTTNPVATEEYGIVADNVMEPTRAPQIGTVNSQGALPGMVWQNRDVYLQGPIWAKIPHTDGNFHPSPLMGGFGLKHPPPQILIKNTPVPADPPTTFNQSKLNSFITQYSTGQVSVEIEWELQKENSKRWNPEIQYTSNYYKSTSVDFAVNTEGVYSEPRPIGTRYLTRNL

SEQ ID NO: 488 - protein, 737 aa, Artificial Sequence
  AAV capsid variant
MAADGYLPDWLEDNLSEGIREWWALKPGAPQPKANQQHQDNARGLVLPGYKYLGPGNGLDKGEPVNAADAAALEHDKAYDQQLKAGDNPYLKYNHADAEFQERLKEDTSFGGNLGRAVFQAKKRLLEPLGLVEEAAKTAPGKKRPVEQSPQEPDSSAGIGKSGAQPAKKRLNFGQTGDSESVPDPQPLGEPPAAPSGVGPNTMAAGGGAPMADNNEGADGVGSSSGNWHCDSTWLGDRVITTSTRTWALPTYNNHLYKQISNGTSGGATNDNTYFGYSTPWGYFDFNRFHCHFSPRDWQRLINNNWGFRPKRLSFKLFNIQVKEVTQNEGTKTIANNLTSTIQVFTDSEYQLPYVLGSAHQGCLPPFPADVFMIPQYGYLTLNNGSQAVGRSSFYCLEYFPSQMLRTGNNFQFTYTFEDVPFHSSYAHSQSLDRLMNPLIDQYLYYLSRTQTTGGTANTQTLGFSQGGPNTMANQAKNWLPGPCYRQQRVSTYPLGDHSANFAWTAGTKYHLNGRNSLANPGIAMATHKDDEERFFPSNGILIFGKQNAARDNADYSDVMLTSEEEIKTTNPVATEEYGIVADNVMEPTRAPQIGTVNSQGALPGMVWQNRDVYLQGPIWAKIPHTDGNFHPSPLMGGFGLKHPPPQILIKNTPVPADPPTTFNQSKLNSFITQYSTGQVSVEIEWELQKENSKRWNPEIQYTSNYYKSTSVDFAVNTEGVYSEPRPIGTRYLTRNL

SEQ ID NO: 489 - protein, 737 aa, Artificial Sequence
  AAV capsid variant
MAADGYLPDWLEDNLSEGIREWWALKPGAPQPKANQQHQDNARGLVLPGYKYLGPGNGLDKGEPVNAADAAALEHDKAYDQQLKAGDNPYLKYNHADAEFQERLKEDTSFGGNLGRAVFQAKKRLLEPLGLVEEAAKTAPGKKRPVEQSPQEPDSSAGIGKSGAQPAKKRLNFGQTGDSESVPDPQPLGEPPAAPSGVGPNTMAAGGGAPMADNNEGADGVGSSSGNWHCDSTWLGDRVITTSTRTWALPTYNNHLYKQISNGTSGGATNDNTYFGYSTPWGYFDFNRFHCHFSPRDWQRLINNNWGFRPKRLSFKLFNIQVKEVTQNEGTKTIANNLTSTIQVFTDSEYQLPYVLGSAHQGCLPPFPADVFMIPQYGYLTLNNGSQAVGRSSFYCLEYFPSQMLRTGNNFQFTYTFEDVPFHSSYAHSQSLDRLMNPLIDQYLYYLSRTQTTGGTANTQTLGFSQGGPNTMANQAKNWLPGPCYRQQRVSTYPLASGSGNFAWTAGTKYHLNGRNSLANPGIAMATHKDDEERFFPSNGILIFGKQNAARDNADYSDVMLTSEEEIKTTNPVATEEYGIVADNVMEPTRAPQIGTVNSQGALPGMVWQNRDVYLQGPIWAKIPHTDGNFHPSPLMGGFGLKHPPPQILIKNTPVPADPPTTFNQSKLNSFITQYSTGQVSVEIEWELQKENSKRWNPEIQYTSNYYKSTSVDFAVNTEGVYSEPRPIGTRYLTRNL

SEQ ID NO: 490 - protein, 737 aa, Artificial Sequence
  AAV capsid variant
MAADGYLPDWLEDNLSEGIREWWALKPGAPQPKANQQHQDNARGLVLPGYKYLGPGNGLDKGEPVNAADAAALEHDKAYDQQLKAGDNPYLKYNHADAEFQERLKEDTSFGGNLGRAVFQAKKRLLEPLGLVEEAAKTAPGKKRPVEQSPQEPDSSAGIGKSGAQPAKKRLNFGQTGDSESVPDPQPLGEPPAAPSGVGPNTMAAGGGAPMADNNEGADGVGSSSGNWHCDSTWLGDRVITTSTRTWALPTYNNHLYKQISNGTSGGATNDNTYFGYSTPWGYFDFNRFHCHFSPRDWQRLINNNWGFRPKRLSFKLFNIQVKEVTQNEGTKTIANNLTSTIQVFTDSEYQLPYVLGSAHQGCLPPFPADVFMIPQYGYLTLNNGSQAVGRSSFYCLEYFPSQMLRTGNNFQFTYTFEDVPFHSSYAHSQSLDRLMNPLIDQYLYYLSRTQTTGGTANTQTLGFSQGGPNTMANQAKNWLPGPCYRQQRVSTYPLLGKEQNFAWTAGTKYHLNGRNSLANPGIAMATHKDDEERFFPSNGILIFGKQNAARDNADYSDVMLTSEEEIKTTNPVATEEYGIVADNVMEPTRAPQIGTVNSQGALPGMVWQNRDVYLQGPIWAKIPHTDGNFHPSPLMGGFGLKHPPPQILIKNTPVPADPPTTFNQSKLNSFITQYSTGQVSVEIEWELQKENSKRWNPEIQYTSNYYKSTSVDFAVNTEGVYSEPRPIGTRYLTRNL

SEQ ID NO: 491 - protein, 737 aa, Artificial Sequence
  AAV capsid variant
MAADGYLPDWLEDNLSEGIREWWALKPGAPQPKANQQHQDNARGLVLPGYKYLGPGNGLDKGEPVNAADAAALEHDKAYDQQLKAGDNPYLKYNHADAEFQERLKEDTSFGGNLGRAVFQAKKRLLEPLGLVEEAAKTAPGKKRPVEQSPQEPDSSAGIGKSGAQPAKKRLNFGQTGDSESVPDPQPLGEPPAAPSGVGPNTMAAGGGAPMADNNEGADGVGSSSGNWHCDSTWLGDRVITTSTRTWALPTYNNHLYKQISNGTSGGATNDNTYFGYSTPWGYFDFNRFHCHFSPRDWQRLINNNWGFRPKRLSFKLFNIQVKEVTQNEGTKTIANNLTSTIQVFTDSEYQLPYVLGSAHQGCLPPFPADVFMIPQYGYLTLNNGSQAVGRSSFYCLEYFPSQMLRTGNNFQFTYTFEDVPFHSSYAHSQSLDRLMNPLIDQYLYYLSRTQTTGGTANTQTLGFSQGGPNTMANQAKNWLPGPCYRQQRVSTYPLSGTNQNFAWTAGTKYHLNGRNSLANPGIAMATHKDDEERFFPSNGILIFGKQNAARDNADYSDVMLTSEEEIKTTNPVATEEYGIVADNVMEPTRAPQIGTVNSQGALPGMVWQNRDVYLQGPIWAKIPHTDGNFHPSPLMGGFGLKHPPPQILIKNTPVPADPPTTFNQSKLNSFITQYSTGQVSVEIEWELQKENSKRWNPEIQYTSNYYKSTSVDFAVNTEGVYSEPRPIGTRYLTRNL

SEQ ID NO: 492 - protein, 737 aa, Artificial Sequence
  AAV capsid variant
MAADGYLPDWLEDNLSEGIREWWALKPGAPQPKANQQHQDNARGLVLPGYKYLGPGNGLDKGEPVNAADAAALEHDKAYDQQLKAGDNPYLKYNHADAEFQERLKEDTSFGGNLGRAVFQAKKRLLEPLGLVEEAAKTAPGKKRPVEQSPQEPDSSAGIGKSGAQPAKKRLNFGQTGDSESVPDPQPLGEPPAAPSGVGPNTMAAGGGAPMADNNEGADGVGSSSGNWHCDSTWLGDRVITTSTRTWALPTYNNHLYKQISNGTSGGATNDNTYFGYSTPWGYFDFNRFHCHFSPRDWQRLINNNWGFRPKRLSFKLFNIQVKEVTQNEGTKTIANNLTSTIQVFTDSEYQLPYVLGSAHQGCLPPFPADVFMIPQYGYLTLNNGSQAVGRSSFYCLEYFPSQMLRTGNNFQFTYTFEDVPFHSSYAHSQSLDRLMNPLIDQYLYYLSRTQTTGGTANTQTLGFSQGGPNTMANQAKNWLPGPCYRQQRVSTYPLRDGQLNFAWTAGTKYHLNGRNSLANPGIAMATHKDDEERFFPSNGILIFGKQNAARDNADYSDVMLTSEEEIKTTNPVATEEYGIVADNVMEPTRAPQIGTVNSQGALPGMVWQNRDVYLQGPIWAKIPHTDGNFHPSPLMGGFGLKHPPPQILIKNTPVPADPPTTFNQSKLNSFITQYSTGQVSVEIEWELQKENSKRWNPEIQYTSNYYKSTSVDFAVNTEGVYSEPRPIGTRYLTRNL

SEQ ID NO: 493 - protein, 737 aa, Artificial Sequence
  AAV capsid variant
MAADGYLPDWLEDNLSEGIREWWALKPGAPQPKANQQHQDNARGLVLPGYKYLGPGNGLDKGEPVNAADAAALEHDKAYDQQLKAGDNPYLKYNHADAEFQERLKEDTSFGGNLGRAVFQAKKRLLEPLGLVEEAAKTAPGKKRPVEQSPQEPDSSAGIGKSGAQPAKKRLNFGQTGDSESVPDPQPLGEPPAAPSGVGPNTMAAGGGAPMADNNEGADGVGSSSGNWHCDSTWLGDRVITTSTRTWALPTYNNHLYKQISNGTSGGATNDNTYFGYSTPWGYFDFNRFHCHFSPRDWQRLINNNWGFRPKRLSFKLFNIQVKEVTQNEGTKTIANNLTSTIQVFTDSEYQLPYVLGSAHQGCLPPFPADVFMIPQYGYLTLNNGSQAVGRSSFYCLEYFPSQMLRTGNNFQFTYTFEDVPFHSSYAHSQSLDRLMNPLIDQYLYYLSRTQTTGGTANTQTLGFSQGGPNTMANQAKNWLPGPCYRQQRVSTYPLADTGTNFAWTAGTKYHLNGRNSLANPGIAMATHKDDEERFFPSNGILIFGKQNAARDNADYSDVMLTSEEEIKTTNPVATEEYGIVADNVMEPTRAPQIGTVNSQGALPGMVWQNRDVYLQGPIWAKIPHTDGNFHPSPLMGGFGLKHPPPQILIKNTPVPADPPTTFNQSKLNSFITQYSTGQVSVEIEWELQKENSKRWNPEIQYTSNYYKSTSVDFAVNTEGVYSEPRPIGTRYLTRNL

SEQ ID NO: 494 - protein, 736 aa, Artificial Sequence
  AAV capsid variant
MAADGYLPDWLEDNLSEGIREWWALKPGAPQPKANQQHQDNARGLVLPGYKYLGPGNGLDKGEPVNAADAAALEHDKAYDQQLKAGDNPYLKYNHADAEFQERLKEDTSFGGNLGRAVFQAKKRLLEPLGLVEEAAKTAPGKKRPVEQSPQEPDSSAGIGKSGAQPAKKRLNFGQTGDSESVPDPQPLGEPPAAPSGVGPNTMAAGGGAPMADNNEGADGVGSSSGNWHCDSTWLGDRVITTSTRTWALPTYNNHLYKQISNGTSGGATNDNTYFGYSTPWGYFDFNRFHCHFSPRDWQRLINNNWGFRPKRLSFKLFNIQVKEVTQNEGTKTIANNLTSTIQVFTDSEYQLPYVLGSAHQGCLPPFPADVFMIPQYGYLTLNNGSQAVGRSSFYCLEYFPSQMLRTGNNFQFTYTFEDVPFHSSYAHSQSLDRLMNPLIDQYLYYLSRTQTTSNGRGVTLGFSQGGPNTMANQAKNWLPGPCYRQQRVSTYPLENFKYNFAWTAGTKYHLNGRNSLANPGIAMATHKDDEERFFPSNGILIFGKQNAARDNADYSDVMLTSEEEIKTTNPVATEEYGIVADNVMEPTRAPQIGTVNSQGALPGMVWQNRDVYLQGPIWAKIPHTDGNFHPSPLMGGFGLKHPPPQILIKNTPVPADPPTTFNQSKLNSFITQYSTGQVSVEIEWELQKENSKRWNPEIQYTSNYYKSTSVDFAVNTEGVYSEPRPIGTRYLTRNL

SEQ ID NO: 495 - protein, 736 aa, Artificial Sequence
  AAV capsid variant
MAADGYLPDWLEDNLSEGIREWWALKPGAPQPKANQQHQDNARGLVLPGYKYLGPGNGLDKGEPVNAADAAALEHDKAYDQQLKAGDNPYLKYNHADAEFQERLKEDTSFGGNLGRAVFQAKKRLLEPLGLVEEAAKTAPGKKRPVEQSPQEPDSSAGIGKSGAQPAKKRLNFGQTGDSESVPDPQPLGEPPAAPSGVGPNTMAAGGGAPMADNNEGADGVGSSSGNWHCDSTWLGDRVITTSTRTWALPTYNNHLYKQISNGTSGGATNDNTYFGYSTPWGYFDFNRFHCHFSPRDWQRLINNNWGFRPKRLSFKLFNIQVKEVTQNEGTKTIANNLTSTIQVFTDSEYQLPYVLGSAHQGCLPPFPADVFMIPQYGYLTLNNGSQAVGRSSFYCLEYFPSQMLRTGNNFQFTYTFEDVPFHSSYAHSQSLDRLMNPLIDQYLYYLSRTQTTSNGRGVTLGFSQGGPNTMANQAKNWLPGPCYRQQRVSTYPLGDHSANFAWTAGTKYHLNGRNSLANPGIAMATHKDDEERFFPSNGILIFGKQNAARDNADYSDVMLTSEEEIKTTNPVATEEYGIVADNVMEPTRAPQIGTVNSQGALPGMVWQNRDVYLQGPIWAKIPHTDGNFHPSPLMGGFGLKHPPPQILIKNTPVPADPPTTFNQSKLNSFITQYSTGQVSVEIEWELQKENSKRWNPEIQYTSNYYKSTSVDFAVNTEGVYSEPRPIGTRYLTRNL

SEQ ID NO: 496 - protein, 736 aa, Artificial Sequence
  AAV capsid variant
MAADGYLPDWLEDNLSEGIREWWALKPGAPQPKANQQHQDNARGLVLPGYKYLGPGNGLDKGEPVNAADAAALEHDKAYDQQLKAGDNPYLKYNHADAEFQERLKEDTSFGGNLGRAVFQAKKRLLEPLGLVEEAAKTAPGKKRPVEQSPQEPDSSAGIGKSGAQPAKKRLNFGQTGDSESVPDPQPLGEPPAAPSGVGPNTMAAGGGAPMADNNEGADGVGSSSGNWHCDSTWLGDRVITTSTRTWALPTYNNHLYKQISNGTSGGATNDNTYFGYSTPWGYFDFNRFHCHFSPRDWQRLINNNWGFRPKRLSFKLFNIQVKEVTQNEGTKTIANNLTSTIQVFTDSEYQLPYVLGSAHQGCLPPFPADVFMIPQYGYLTLNNGSQAVGRSSFYCLEYFPSQMLRTGNNFQFTYTFEDVPFHSSYAHSQSLDRLMNPLIDQYLYYLSRTQTTSNGRGVTLGFSQGGPNTMANQAKNWLPGPCYRQQRVSTYPLASGSGNFAWTAGTKYHLNGRNSLANPGIAMATHKDDEERFFPSNGILIFGKQNAARDNADYSDVMLTSEEEIKTTNPVATEEYGIVADNVMEPTRAPQIGTVNSQGALPGMVWQNRDVYLQGPIWAKIPHTDGNFHPSPLMGGFGLKHPPPQILIKNTPVPADPPTTFNQSKLNSFITQYSTGQVSVEIEWELQKENSKRWNPEIQYTSNYYKSTSVDFAVNTEGVYSEPRPIGTRYLTRNL

SEQ ID NO: 497 - protein, 736 aa, Artificial Sequence
  AAV capsid variant
MAADGYLPDWLEDNLSEGIREWWALKPGAPQPKANQQHQDNARGLVLPGYKYLGPGNGLDKGEPVNAADAAALEHDKAYDQQLKAGDNPYLKYNHADAEFQERLKEDTSFGGNLGRAVFQAKKRLLEPLGLVEEAAKTAPGKKRPVEQSPQEPDSSAGIGKSGAQPAKKRLNFGQTGDSESVPDPQPLGEPPAAPSGVGPNTMAAGGGAPMADNNEGADGVGSSSGNWHCDSTWLGDRVITTSTRTWALPTYNNHLYKQISNGTSGGATNDNTYFGYSTPWGYFDFNRFHCHFSPRDWQRLINNNWGFRPKRLSFKLFNIQVKEVTQNEGTKTIANNLTSTIQVFTDSEYQLPYVLGSAHQGCLPPFPADVFMIPQYGYLTLNNGSQAVGRSSFYCLEYFPSQMLRTGNNFQFTYTFEDVPFHSSYAHSQSLDRLMNPLIDQYLYYLSRTQTTSNGRGVTLGFSQGGPNTMANQAKNWLPGPCYRQQRVSTYPLLGKEQNFAWTAGTKYHLNGRNSLANPGIAMATHKDDEERFFPSNGILIFGKQNAARDNADYSDVMLTSEEEIKTTNPVATEEYGIVADNVMEPTRAPQIGTVNSQGALPGMVWQNRDVYLQGPIWAKIPHTDGNFHPSPLMGGFGLKHPPPQILIKNTPVPADPPTTFNQSKLNSFITQYSTGQVSVEIEWELQKENSKRWNPEIQYTSNYYKSTSVDFAVNTEGVYSEPRPIGTRYLTRNL

SEQ ID NO: 498 - protein, 736 aa, Artificial Sequence
  AAV capsid variant
MAADGYLPDWLEDNLSEGIREWWALKPGAPQPKANQQHQDNARGLVLPGYKYLGPGNGLDKGEPVNAADAAALEHDKAYDQQLKAGDNPYLKYNHADAEFQERLKEDTSFGGNLGRAVFQAKKRLLEPLGLVEEAAKTAPGKKRPVEQSPQEPDSSAGIGKSGAQPAKKRLNFGQTGDSESVPDPQPLGEPPAAPSGVGPNTMAAGGGAPMADNNEGADGVGSSSGNWHCDSTWLGDRVITTSTRTWALPTYNNHLYKQISNGTSGGATNDNTYFGYSTPWGYFDFNRFHCHFSPRDWQRLINNNWGFRPKRLSFKLFNIQVKEVTQNEGTKTIANNLTSTIQVFTDSEYQLPYVLGSAHQGCLPPFPADVFMIPQYGYLTLNNGSQAVGRSSFYCLEYFPSQMLRTGNNFQFTYTFEDVPFHSSYAHSQSLDRLMNPLIDQYLYYLSRTQTTSNGRGVTLGFSQGGPNTMANQAKNWLPGPCYRQQRVSTYPLSGTNQNFAWTAGTKYHLNGRNSLANPGIAMATHKDDEERFFPSNGILIFGKQNAARDNADYSDVMLTSEEEIKTTNPVATEEYGIVADNVMEPTRAPQIGTVNSQGALPGMVWQNRDVYLQGPIWAKIPHTDGNFHPSPLMGGFGLKHPPPQILIKNTPVPADPPTTFNQSKLNSFITQYSTGQVSVEIEWELQKENSKRWNPEIQYTSNYYKSTSVDFAVNTEGVYSEPRPIGTRYLTRNL

SEQ ID NO: 499 - protein, 736 aa, Artificial Sequence
  AAV capsid variant
MAADGYLPDWLEDNLSEGIREWWALKPGAPQPKANQQHQDNARGLVLPGYKYLGPGNGLDKGEPVNAADAAALEHDKAYDQQLKAGDNPYLKYNHADAEFQERLKEDTSFGGNLGRAVFQAKKRLLEPLGLVEEAAKTAPGKKRPVEQSPQEPDSSAGIGKSGAQPAKKRLNFGQTGDSESVPDPQPLGEPPAAPSGVGPNTMAAGGGAPMADNNEGADGVGSSSGNWHCDSTWLGDRVITTSTRTWALPTYNNHLYKQISNGTSGGATNDNTYFGYSTPWGYFDFNRFHCHFSPRDWQRLINNNWGFRPKRLSFKLFNIQVKEVTQNEGTKTIANNLTSTIQVFTDSEYQLPYVLGSAHQGCLPPFPADVFMIPQYGYLTLNNGSQAVGRSSFYCLEYFPSQMLRTGNNFQFTYTFEDVPFHSSYAHSQSLDRLMNPLIDQYLYYLSRTQTTSNGRGVTLGFSQGGPNTMANQAKNWLPGPCYRQQRVSTYPLRDGQLNFAWTAGTKYHLNGRNSLANPGIAMATHKDDEERFFPSNGILIFGKQNAARDNADYSDVMLTSEEEIKTTNPVATEEYGIVADNVMEPTRAPQIGTVNSQGALPGMVWQNRDVYLQGPIWAKIPHTDGNFHPSPLMGGFGLKHPPPQILIKNTPVPADPPTTFNQSKLNSFITQYSTGQVSVEIEWELQKENSKRWNPEIQYTSNYYKSTSVDFAVNTEGVYSEPRPIGTRYLTRNL

SEQ ID NO: 500 - protein, 736 aa, Artificial Sequence
  AAV capsid variant
MAADGYLPDWLEDNLSEGIREWWALKPGAPQPKANQQHQDNARGLVLPGYKYLGPGNGLDKGEPVNAADAAALEHDKAYDQQLKAGDNPYLKYNHADAEFQERLKEDTSFGGNLGRAVFQAKKRLLEPLGLVEEAAKTAPGKKRPVEQSPQEPDSSAGIGKSGAQPAKKRLNFGQTGDSESVPDPQPLGEPPAAPSGVGPNTMAAGGGAPMADNNEGADGVGSSSGNWHCDSTWLGDRVITTSTRTWALPTYNNHLYKQISNGTSGGATNDNTYFGYSTPWGYFDFNRFHCHFSPRDWQRLINNNWGFRPKRLSFKLFNIQVKEVTQNEGTKTIANNLTSTIQVFTDSEYQLPYVLGSAHQGCLPPFPADVFMIPQYGYLTLNNGSQAVGRSSFYCLEYFPSQMLRTGNNFQFTYTFEDVPFHSSYAHSQSLDRLMNPLIDQYLYYLSRTQTTSNGRGVTLGFSQGGPNTMANQAKNWLPGPCYRQQRVSTYPLADTGTNFAWTAGTKYHLNGRNSLANPGIAMATHKDDEERFFPSNGILIFGKQNAARDNADYSDVMLTSEEEIKTTNPVATEEYGIVADNVMEPTRAPQIGTVNSQGALPGMVWQNRDVYLQGPIWAKIPHTDGNFHPSPLMGGFGLKHPPPQILIKNTPVPADPPTTFNQSKLNSFITQYSTGQVSVEIEWELQKENSKRWNPEIQYTSNYYKSTSVDFAVNTEGVYSEPRPIGTRYLTRNL

SEQ ID NO: 501 - protein, 738 aa, Artificial Sequence
  AAV capsid variant
MAADGYLPDWLEDNLSEGIREWWALKPGAPKPKANQQKQDDGRGLVLPGYKYLGPFNGLDKGEPVNAADAAALEHDKAYDQQLQAGDNPYLRYNHADAEFQERLQEDTSFGGNLGRAVFQAKKRVLEPLGLVEEGAKTAPGKKRPVEPSPQRSPDSSTGIGKKGQQPARKRLNFGQTGDSESVPDPQPLGEPPAAPSGVGPNTMAAGGGAPMADNNEGADGVGSSSGNWHCDSTWLGDRVITTSTRTWALPTYNNHLYKQISNGTSGGATNDNTYFGYSTPWGYFDFNRFHCHFSPRDWQRLINNNWGFRPKRLSFKLFNIQVKEVTQNEGTKTIANNLTSTIQVFTDSEYQLPYVLGSAHQGCLPPFPADVFMIPQYGYLTLNNGSQAVGRSSFYCLEYFPSQMLRTGNNFQFTYTFEDVPFHSSYAHSQSLDRLMNPLIDQYLYYLSRTQTTGGTANTQTLGFSQGGPNTMANQAKNWLPGPCYRQQRVSTYPLNGGVVNFAWTAGTKYHLNGRNSLANPGIAMATHKDDEERFFPSNGILIFGKQNAARDNADYSDVMLTSEEEIKTTNPVATEEYGIVADNLQQQNTAPQIGTVNSQGALPGMVWQNRDVYLQGPIWAKIPHTDGNFHPSPLMGGFGLKHPPPQILIKNTPVPADPPTTFNQSKLNSFITQYSTGQVSVEIEWELQKENSKRWNPEIQYTSNYYKSTSVDFAVNTEGVYSEPRPIGTRYLTRNL

SEQ ID NO: 502 - protein, 738 aa, Artificial Sequence
  AAV capsid variant
MAADGYLPDWLEDNLSEGIREWWALKPGAPKPKANQQKQDDGRGLVLPGYKYLGPFNGLDKGEPVNAADAAALEHDKAYDQQLQAGDNPYLRYNHADAEFQERLQEDTSFGGNLGRAVFQAKKRVLEPLGLVEEGAKTAPGKKRPVEPSPQRSPDSSTGIGKKGQQPARKRLNFGQTGDSESVPDPQPLGEPPAAPSGVGPNTMAAGGGAPMADNNEGADGVGSSSGNWHCDSTWLGDRVITTSTRTWALPTYNNHLYKQISNGTSGGATNDNTYFGYSTPWGYFDFNRFHCHFSPRDWQRLINNNWGFRPKRLSFKLFNIQVKEVTQNEGTKTIANNLTSTIQVFTDSEYQLPYVLGSAHQGCLPPFPADVFMIPQYGYLTLNNGSQAVGRSSFYCLEYFPSQMLRTGNNFQFTYTFEDVPFHSSYAHSQSLDRLMNPLIDQYLYYLSRTQTTGGTANTQTLGFSQGGPNTMANQAKNWLPGPCYRQQRVSTYPLEMPIGNFAWTAGTKYHLNGRNSLANPGIAMATHKDDEERFFPSNGILIFGKQNAARDNADYSDVMLTSEEEIKTTNPVATEEYGIVADNLQQQNTAPQIGTVNSQGALPGMVWQNRDVYLQGPIWAKIPHTDGNFHPSPLMGGFGLKHPPPQILIKNTPVPADPPTTFNQSKLNSFITQYSTGQVSVEIEWELQKENSKRWNPEIQYTSNYYKSTSVDFAVNTEGVYSEPRPIGTRYLTRNL

SEQ ID NO: 503 - protein, 739 aa, Artificial Sequence
  AAV capsid variant
MAADGYLPDWLEDNLSEGIREWWALKPGAPKPKANQQKQDDGRGLVLPGYKYLGPFNGLDKGEPVNAADAAALEHDKAYDQQLQAGDNPYLRYNHADAEFQERLQEDTSFGGNLGRAVFQAKKRVLEPLGLVEEGAKTAPGKKRPVEPSPQRSPDSSTGIGKKGQQPARKRLNFGQTGDSESVPDPQPLGEPPAAPSGVGPNTMAAGGGAPMADNNEGADGVGSSSGNWHCDSTWLGDRVITTSTRTWALPTYNNHLYKQISNGTSGGATNDNTYFGYSTPWGYFDFNRFHCHFSPRDWQRLINNNWGFRPKRLSFKLFNIQVKEVTQNEGTKTIANNLTSTIQVFTDSEYQLPYVLGSAHQGCLPPFPADVFMIPQYGYLTLNNGSQAVGRSSFYCLEYFPSQMLRTGNNFQFTYTFEDVPFHSSYAHSQSLDRLMNPLIDQYLYYLSRTQTTGGTANTQTLGFSQGGPNTMANQAKNWLPGPCYRQQRVSTYPLEDMGTINFAWTAGTKYHLNGRNSLANPGIAMATHKDDEERFFPSNGILIFGKQNAARDNADYSDVMLTSEEEIKTTNPVATEEYGIVADNLQQQNTAPQIGTVNSQGALPGMVWQNRDVYLQGPIWAKIPHTDGNFHPSPLMGGFGLKHPPPQILIKNTPVPADPPTTFNQSKLNSFITQYSTGQVSVEIEWELQKENSKRWNPEIQYTSNYYKSTSVDFAVNTEGVYSEPRPIGTRYLTRNL

SEQ ID NO: 504 - protein, 737 aa, Artificial Sequence
  AAV capsid variant
MAADGYLPDWLEDNLSEGIREWWALKPGAPKPKANQQKQDDGRGLVLPGYKYLGPFNGLDKGEPVNAADAAALEHDKAYDQQLQAGDNPYLRYNHADAEFQERLQEDTSFGGNLGRAVFQAKKRVLEPLGLVEEGAKTAPGKKRPVEPSPQRSPDSSTGIGKKGQQPARKRLNFGQTGDSESVPDPQPLGEPPAAPSGVGPNTMAAGGGAPMADNNEGADGVGSSSGNWHCDSTWLGDRVITTSTRTWALPTYNNHLYKQISNGTSGGATNDNTYFGYSTPWGYFDFNRFHCHFSPRDWQRLINNNWGFRPKRLSFKLFNIQVKEVTQNEGTKTIANNLTSTIQVFTDSEYQLPYVLGSAHQGCLPPFPADVFMIPQYGYLTLNNGSQAVGRSSFYCLEYFPSQMLRTGNNFQFTYTFEDVPFHSSYAHSQSLDRLMNPLIDQYLYYLSRTQTTSNGRGVTLGFSQGGPNTMANQAKNWLPGPCYRQQRVSTYPLNGGVVNFAWTAGTKYHLNGRNSLANPGIAMATHKDDEERFFPSNGILIFGKQNAARDNADYSDVMLTSEEEIKTTNPVATEEYGIVADNLQQQNTAPQIGTVNSQGALPGMVWQNRDVYLQGPIWAKIPHTDGNFHPSPLMGGFGLKHPPPQILIKNTPVPADPPTTFNQSKLNSFITQYSTGQVSVEIEWELQKENSKRWNPEIQYTSNYYKSTSVDFAVNTEGVYSEPRPIGTRYLTRNL

SEQ ID NO: 505 - protein, 737 aa, Artificial Sequence
  AAV capsid variant
MAADGYLPDWLEDNLSEGIREWWALKPGAPKPKANQQKQDDGRGLVLPGYKYLGPFNGLDKGEPVNAADAAALEHDKAYDQQLQAGDNPYLRYNHADAEFQERLQEDTSFGGNLGRAVFQAKKRVLEPLGLVEEGAKTAPGKKRPVEPSPQRSPDSSTGIGKKGQQPARKRLNFGQTGDSESVPDPQPLGEPPAAPSGVGPNTMAAGGGAPMADNNEGADGVGSSSGNWHCDSTWLGDRVITTSTRTWALPTYNNHLYKQISNGTSGGATNDNTYFGYSTPWGYFDFNRFHCHFSPRDWQRLINNNWGFRPKRLSFKLFNIQVKEVTQNEGTKTIANNLTSTIQVFTDSEYQLPYVLGSAHQGCLPPFPADVFMIPQYGYLTLNNGSQAVGRSSFYCLEYFPSQMLRTGNNFQFTYTFEDVPFHSSYAHSQSLDRLMNPLIDQYLYYLSRTQTTSNGRGVTLGFSQGGPNTMANQAKNWLPGPCYRQQRVSTYPLEMPIGNFAWTAGTKYHLNGRNSLANPGIAMATHKDDEERFFPSNGILIFGKQNAARDNADYSDVMLTSEEEIKTTNPVATEEYGIVADNLQQQNTAPQIGTVNSQGALPGMVWQNRDVYLQGPIWAKIPHTDGNFHPSPLMGGFGLKHPPPQILIKNTPVPADPPTTFNQSKLNSFITQYSTGQVSVEIEWELQKENSKRWNPEIQYTSNYYKSTSVDFAVNTEGVYSEPRPIGTRYLTRNL

SEQ ID NO: 506 - protein, 738 aa, Artificial Sequence
  AAV capsid variant
MAADGYLPDWLEDNLSEGIREWWALKPGAPKPKANQQKQDDGRGLVLPGYKYLGPFNGLDKGEPVNAADAAALEHDKAYDQQLQAGDNPYLRYNHADAEFQERLQEDTSFGGNLGRAVFQAKKRVLEPLGLVEEGAKTAPGKKRPVEPSPQRSPDSSTGIGKKGQQPARKRLNFGQTGDSESVPDPQPLGEPPAAPSGVGPNTMAAGGGAPMADNNEGADGVGSSSGNWHCDSTWLGDRVITTSTRTWALPTYNNHLYKQISNGTSGGATNDNTYFGYSTPWGYFDFNRFHCHFSPRDWQRLINNNWGFRPKRLSFKLFNIQVKEVTQNEGTKTIANNLTSTIQVFTDSEYQLPYVLGSAHQGCLPPFPADVFMIPQYGYLTLNNGSQAVGRSSFYCLEYFPSQMLRTGNNFQFTYTFEDVPFHSSYAHSQSLDRLMNPLIDQYLYYLSRTQTTSNGRGVTLGFSQGGPNTMANQAKNWLPGPCYRQQRVSTYPLEDMGTINFAWTAGTKYHLNGRNSLANPGIAMATHKDDEERFFPSNGILIFGKQNAARDNADYSDVMLTSEEEIKTTNPVATEEYGIVADNLQQQNTAPQIGTVNSQGALPGMVWQNRDVYLQGPIWAKIPHTDGNFHPSPLMGGFGLKHPPPQILIKNTPVPADPPTTFNQSKLNSFITQYSTGQVSVEIEWELQKENSKRWNPEIQYTSNYYKSTSVDFAVNTEGVYSEPRPIGTRYLTRNL

SEQ ID NO: 507 - protein, 738 aa, Artificial Sequence
  AAV capsid variant
MAADGYLPDWLEDNLSEGIREWWALKPGAPKPKANQQKQDDGRGLVLPGYKYLGPFNGLDKGEPVNAADAAALEHDKAYDQQLQAGDNPYLRYNHADAEFQERLQEDTSFGGNLGRAVFQAKKRVLEPLGLVEEGAKTAPGKKRPVEPSPQRSPDSSTGIGKKGQQPARKRLNFGQTGDSESVPDPQPLGEPPAAPSGVGPNTMAAGGGAPMADNNEGADGVGSSSGNWHCDSTWLGDRVITTSTRTWALPTYNNHLYKQISNGTSGGATNDNTYFGYSTPWGYFDFNRFHCHFSPRDWQRLINNNWGFRPKRLSFKLFNIQVKEVTQNEGTKTIANNLTSTIQVFTDSEYQLPYVLGSAHQGCLPPFPADVFMIPQYGYLTLNNGSQAVGRSSFYCLEYFPSQMLRTGNNFQFTYTFEDVPFHSSYAHSQSLDRLMNPLIDQYLYYLSRTQTTGGTANTQTLGFSQGGPNTMANQAKNWLPGPCYRQQRVSTYPLNGGVVNFAWTAGTKYHLNGRNSLANPGIAMATHKDDEERFFPSNGILIFGKQNAARDNADYSDVMLTSEEEIKTTNPVATEEYGIVADNVMEPTRAPQIGTVNSQGALPGMVWQNRDVYLQGPIWAKIPHTDGNFHPSPLMGGFGLKHPPPQILIKNTPVPADPPTTFNQSKLNSFITQYSTGQVSVEIEWELQKENSKRWNPEIQYTSNYYKSTSVDFAVNTEGVYSEPRPIGTRYLTRNL

SEQ ID NO: 508 - protein, 738 aa, Artificial Sequence
  AAV capsid variant
MAADGYLPDWLEDNLSEGIREWWALKPGAPKPKANQQKQDDGRGLVLPGYKYLGPFNGLDKGEPVNAADAAALEHDKAYDQQLQAGDNPYLRYNHADAEFQERLQEDTSFGGNLGRAVFQAKKRVLEPLGLVEEGAKTAPGKKRPVEPSPQRSPDSSTGIGKKGQQPARKRLNFGQTGDSESVPDPQPLGEPPAAPSGVGPNTMAAGGGAPMADNNEGADGVGSSSGNWHCDSTWLGDRVITTSTRTWALPTYNNHLYKQISNGTSGGATNDNTYFGYSTPWGYFDFNRFHCHFSPRDWQRLINNNWGFRPKRLSFKLFNIQVKEVTQNEGTKTIANNLTSTIQVFTDSEYQLPYVLGSAHQGCLPPFPADVFMIPQYGYLTLNNGSQAVGRSSFYCLEYFPSQMLRTGNNFQFTYTFEDVPFHSSYAHSQSLDRLMNPLIDQYLYYLSRTQTTGGTANTQTLGFSQGGPNTMANQAKNWLPGPCYRQQRVSTYPLEMPIGNFAWTAGTKYHLNGRNSLANPGIAMATHKDDEERFFPSNGILIFGKQNAARDNADYSDVMLTSEEEIKTTNPVATEEYGIVADNVMEPTRAPQIGTVNSQGALPGMVWQNRDVYLQGPIWAKIPHTDGNFHPSPLMGGFGLKHPPPQILIKNTPVPADPPTTFNQSKLNSFITQYSTGQVSVEIEWELQKENSKRWNPEIQYTSNYYKSTSVDFAVNTEGVYSEPRPIGTRYLTRNL

SEQ ID NO: 509 - protein, 739 aa, Artificial Sequence
  AAV capsid variant
MAADGYLPDWLEDNLSEGIREWWALKPGAPKPKANQQKQDDGRGLVLPGYKYLGPFNGLDKGEPVNAADAAALEHDKAYDQQLQAGDNPYLRYNHADAEFQERLQEDTSFGGNLGRAVFQAKKRVLEPLGLVEEGAKTAPGKKRPVEPSPQRSPDSSTGIGKKGQQPARKRLNFGQTGDSESVPDPQPLGEPPAAPSGVGPNTMAAGGGAPMADNNEGADGVGSSSGNWHCDSTWLGDRVITTSTRTWALPTYNNHLYKQISNGTSGGATNDNTYFGYSTPWGYFDFNRFHCHFSPRDWQRLINNNWGFRPKRLSFKLFNIQVKEVTQNEGTKTIANNLTSTIQVFTDSEYQLPYVLGSAHQGCLPPFPADVFMIPQYGYLTLNNGSQAVGRSSFYCLEYFPSQMLRTGNNFQFTYTFEDVPFHSSYAHSQSLDRLMNPLIDQYLYYLSRTQTTGGTANTQTLGFSQGGPNTMANQAKNWLPGPCYRQQRVSTYPLEDMGTINFAWTAGTKYHLNGRNSLANPGIAMATHKDDEERFFPSNGILIFGKQNAARDNADYSDVMLTSEEEIKTTNPVATEEYGIVADNVMEPTRAPQIGTVNSQGALPGMVWQNRDVYLQGPIWAKIPHTDGNFHPSPLMGGFGLKHPPPQILIKNTPVPADPPTTFNQSKLNSFITQYSTGQVSVEIEWELQKENSKRWNPEIQYTSNYYKSTSVDFAVNTEGVYSEPRPIGTRYLTRNL

SEQ ID NO: 510 - protein, 737 aa, Artificial Sequence
  AAV capsid variant
MAADGYLPDWLEDNLSEGIREWWALKPGAPKPKANQQKQDDGRGLVLPGYKYLGPFNGLDKGEPVNAADAAALEHDKAYDQQLQAGDNPYLRYNHADAEFQERLQEDTSFGGNLGRAVFQAKKRVLEPLGLVEEGAKTAPGKKRPVEPSPQRSPDSSTGIGKKGQQPARKRLNFGQTGDSESVPDPQPLGEPPAAPSGVGPNTMAAGGGAPMADNNEGADGVGSSSGNWHCDSTWLGDRVITTSTRTWALPTYNNHLYKQISNGTSGGATNDNTYFGYSTPWGYFDFNRFHCHFSPRDWQRLINNNWGFRPKRLSFKLFNIQVKEVTQNEGTKTIANNLTSTIQVFTDSEYQLPYVLGSAHQGCLPPFPADVFMIPQYGYLTLNNGSQAVGRSSFYCLEYFPSQMLRTGNNFQFTYTFEDVPFHSSYAHSQSLDRLMNPLIDQYLYYLSRTQTTSNGRGVTLGFSQGGPNTMANQAKNWLPGPCYRQQRVSTYPLNGGVVNFAWTAGTKYHLNGRNSLANPGIAMATHKDDEERFFPSNGILIFGKQNAARDNADYSDVMLTSEEEIKTTNPVATEEYGIVADNVMEPTRAPQIGTVNSQGALPGMVWQNRDVYLQGPIWAKIPHTDGNFHPSPLMGGFGLKHPPPQILIKNTPVPADPPTTFNQSKLNSFITQYSTGQVSVEIEWELQKENSKRWNPEIQYTSNYYKSTSVDFAVNTEGVYSEPRPIGTRYLTRNL

SEQ ID NO: 511 - protein, 737 aa, Artificial Sequence
  AAV capsid variant
MAADGYLPDWLEDNLSEGIREWWALKPGAPKPKANQQKQDDGRGLVLPGYKYLGPFNGLDKGEPVNAADAAALEHDKAYDQQLQAGDNPYLRYNHADAEFQERLQEDTSFGGNLGRAVFQAKKRVLEPLGLVEEGAKTAPGKKRPVEPSPQRSPDSSTGIGKKGQQPARKRLNFGQTGDSESVPDPQPLGEPPAAPSGVGPNTMAAGGGAPMADNNEGADGVGSSSGNWHCDSTWLGDRVITTSTRTWALPTYNNHLYKQISNGTSGGATNDNTYFGYSTPWGYFDFNRFHCHFSPRDWQRLINNNWGFRPKRLSFKLFNIQVKEVTQNEGTKTIANNLTSTIQVFTDSEYQLPYVLGSAHQGCLPPFPADVFMIPQYGYLTLNNGSQAVGRSSFYCLEYFPSQMLRTGNNFQFTYTFEDVPFHSSYAHSQSLDRLMNPLIDQYLYYLSRTQTTSNGRGVTLGFSQGGPNTMANQAKNWLPGPCYRQQRVSTYPLEMPIGNFAWTAGTKYHLNGRNSLANPGIAMATHKDDEERFFPSNGILIFGKQNAARDNADYSDVMLTSEEEIKTTNPVATEEYGIVADNVMEPTRAPQIGTVNSQGALPGMVWQNRDVYLQGPIWAKIPHTDGNFHPSPLMGGFGLKHPPPQILIKNTPVPADPPTTFNQSKLNSFITQYSTGQVSVEIEWELQKENSKRWNPEIQYTSNYYKSTSVDFAVNTEGVYSEPRPIGTRYLTRNL

SEQ ID NO: 512 - protein, 738 aa, Artificial Sequence
  AAV capsid variant
MAADGYLPDWLEDNLSEGIREWWALKPGAPKPKANQQKQDDGRGLVLPGYKYLGPFNGLDKGEPVNAADAAALEHDKAYDQQLQAGDNPYLRYNHADAEFQERLQEDTSFGGNLGRAVFQAKKRVLEPLGLVEEGAKTAPGKKRPVEPSPQRSPDSSTGIGKKGQQPARKRLNFGQTGDSESVPDPQPLGEPPAAPSGVGPNTMAAGGGAPMADNNEGADGVGSSSGNWHCDSTWLGDRVITTSTRTWALPTYNNHLYKQISNGTSGGATNDNTYFGYSTPWGYFDFNRFHCHFSPRDWQRLINNNWGFRPKRLSFKLFNIQVKEVTQNEGTKTIANNLTSTIQVFTDSEYQLPYVLGSAHQGCLPPFPADVFMIPQYGYLTLNNGSQAVGRSSFYCLEYFPSQMLRTGNNFQFTYTFEDVPFHSSYAHSQSLDRLMNPLIDQYLYYLSRTQTTSNGRGVTLGFSQGGPNTMANQAKNWLPGPCYRQQRVSTYPLEDMGTINFAWTAGTKYHLNGRNSLANPGIAMATHKDDEERFFPSNGILIFGKQNAARDNADYSDVMLTSEEEIKTTNPVATEEYGIVADNVMEPTRAPQIGTVNSQGALPGMVWQNRDVYLQGPIWAKIPHTDGNFHPSPLMGGFGLKHPPPQILIKNTPVPADPPTTFNQSKLNSFITQYSTGQVSVEIEWELQKENSKRWNPEIQYTSNYYKSTSVDFAVNTEGVYSEPRPIGTRYLTRNL

SEQ ID NO: 513 - protein, 737 aa, Artificial Sequence
  AAV capsid variant
MAADGYLPDWLEDNLSEGIREWWALKPGAPQPKANQQHQDNARGLVLPGYKYLGPGNGLDKGEPVNAADAAALEHDKAYDQQLKAGDNPYLKYNHADAEFQERLKEDTSFGGNLGRAVFQAKKRLLEPLGLVEEAAKTAPGKKRPVEQSPQEPDSSAGIGKSGAQPAKKRLNFGQTGDSESVPDPQPLGEPPAAPSGVGPNTMAAGGGAPMADNNEGADGVGSSSGNWHCDSTWLGDRVITTSTRTWALPTYNNHLYKQISNGTSGGATNDNTYFGYSTPWGYFDFNRFHCHFSPRDWQRLINNNWGFRPKRLSFKLFNIQVKEVTQNEGTKTIANNLTSTIQVFTDSEYQLPYVLGSAHQGCLPPFPADVFMIPQYGYLTLNNGSQAVGRSSFYCLEYFPSQMLRTGNNFQFTYTFEDVPFHSSYAHSQSLDRLMNPLIDQYLYYLSRTQTTGGTANTQTLGFSQGGPNTMANQAKNWLPGPCYRQQRVSTYPLNGGVVNFAWTAGTKYHLNGRNSLANPGIAMATHKDDEERFFPSNGILIFGKQNAARDNADYSDVMLTSEEEIKTTNPVATEEYGIVADNLQQQNTAPQIGTVNSQGALPGMVWQNRDVYLQGPIWAKIPHTDGNFHPSPLMGGFGLKHPPPQILIKNTPVPADPPTTFNQSKLNSFITQYSTGQVSVEIEWELQKENSKRWNPEIQYTSNYYKSTSVDFAVNTEGVYSEPRPIGTRYLTRNL

SEQ ID NO: 514 - protein, 737 aa, Artificial Sequence
  AAV capsid variant
MAADGYLPDWLEDNLSEGIREWWALKPGAPQPKANQQHQDNARGLVLPGYKYLGPGNGLDKGEPVNAADAAALEHDKAYDQQLKAGDNPYLKYNHADAEFQERLKEDTSFGGNLGRAVFQAKKRLLEPLGLVEEAAKTAPGKKRPVEQSPQEPDSSAGIGKSGAQPAKKRLNFGQTGDSESVPDPQPLGEPPAAPSGVGPNTMAAGGGAPMADNNEGADGVGSSSGNWHCDSTWLGDRVITTSTRTWALPTYNNHLYKQISNGTSGGATNDNTYFGYSTPWGYFDFNRFHCHFSPRDWQRLINNNWGFRPKRLSFKLFNIQVKEVTQNEGTKTIANNLTSTIQVFTDSEYQLPYVLGSAHQGCLPPFPADVFMIPQYGYLTLNNGSQAVGRSSFYCLEYFPSQMLRTGNNFQFTYTFEDVPFHSSYAHSQSLDRLMNPLIDQYLYYLSRTQTTGGTANTQTLGFSQGGPNTMANQAKNWLPGPCYRQQRVSTYPLEMPIGNFAWTAGTKYHLNGRNSLANPGIAMATHKDDEERFFPSNGILIFGKQNAARDNADYSDVMLTSEEEIKTTNPVATEEYGIVADNLQQQNTAPQIGTVNSQGALPGMVWQNRDVYLQGPIWAKIPHTDGNFHPSPLMGGFGLKHPPPQILIKNTPVPADPPTTFNQSKLNSFITQYSTGQVSVEIEWELQKENSKRWNPEIQYTSNYYKSTSVDFAVNTEGVYSEPRPIGTRYLTRNL

SEQ ID NO: 515 - protein, 738 aa, Artificial Sequence
  AAV capsid variant
MAADGYLPDWLEDNLSEGIREWWALKPGAPQPKANQQHQDNARGLVLPGYKYLGPGNGLDKGEPVNAADAAALEHDKAYDQQLKAGDNPYLKYNHADAEFQERLKEDTSFGGNLGRAVFQAKKRLLEPLGLVEEAAKTAPGKKRPVEQSPQEPDSSAGIGKSGAQPAKKRLNFGQTGDSESVPDPQPLGEPPAAPSGVGPNTMAAGGGAPMADNNEGADGVGSSSGNWHCDSTWLGDRVITTSTRTWALPTYNNHLYKQISNGTSGGATNDNTYFGYSTPWGYFDFNRFHCHFSPRDWQRLINNNWGFRPKRLSFKLFNIQVKEVTQNEGTKTIANNLTSTIQVFTDSEYQLPYVLGSAHQGCLPPFPADVFMIPQYGYLTLNNGSQAVGRSSFYCLEYFPSQMLRTGNNFQFTYTFEDVPFHSSYAHSQSLDRLMNPLIDQYLYYLSRTQTTGGTANTQTLGFSQGGPNTMANQAKNWLPGPCYRQQRVSTYPLEDMGTINFAWTAGTKYHLNGRNSLANPGIAMATHKDDEERFFPSNGILIFGKQNAARDNADYSDVMLTSEEEIKTTNPVATEEYGIVADNLQQQNTAPQIGTVNSQGALPGMVWQNRDVYLQGPIWAKIPHTDGNFHPSPLMGGFGLKHPPPQILIKNTPVPADPPTTFNQSKLNSFITQYSTGQVSVEIEWELQKENSKRWNPEIQYTSNYYKSTSVDFAVNTEGVYSEPRPIGTRYLTRNL

SEQ ID NO: 516 - protein, 736 aa, Artificial Sequence
  AAV capsid variant
MAADGYLPDWLEDNLSEGIREWWALKPGAPQPKANQQHQDNARGLVLPGYKYLGPGNGLDKGEPVNAADAAALEHDKAYDQQLKAGDNPYLKYNHADAEFQERLKEDTSFGGNLGRAVFQAKKRLLEPLGLVEEAAKTAPGKKRPVEQSPQEPDSSAGIGKSGAQPAKKRLNFGQTGDSESVPDPQPLGEPPAAPSGVGPNTMAAGGGAPMADNNEGADGVGSSSGNWHCDSTWLGDRVITTSTRTWALPTYNNHLYKQISNGTSGGATNDNTYFGYSTPWGYFDFNRFHCHFSPRDWQRLINNNWGFRPKRLSFKLFNIQVKEVTQNEGTKTIANNLTSTIQVFTDSEYQLPYVLGSAHQGCLPPFPADVFMIPQYGYLTLNNGSQAVGRSSFYCLEYFPSQMLRTGNNFQFTYTFEDVPFHSSYAHSQSLDRLMNPLIDQYLYYLSRTQTTSNGRGVTLGFSQGGPNTMANQAKNWLPGPCYRQQRVSTYPLNGGVVNFAWTAGTKYHLNGRNSLANPGIAMATHKDDEERFFPSNGILIFGKQNAARDNADYSDVMLTSEEEIKTTNPVATEEYGIVADNLQQQNTAPQIGTVNSQGALPGMVWQNRDVYLQGPIWAKIPHTDGNFHPSPLMGGFGLKHPPPQILIKNTPVPADPPTTFNQSKLNSFITQYSTGQVSVEIEWELQKENSKRWNPEIQYTSNYYKSTSVDFAVNTEGVYSEPRPIGTRYLTRNL

SEQ ID NO: 517 - protein, 736 aa, Artificial Sequence
  AAV capsid variant
MAADGYLPDWLEDNLSEGIREWWALKPGAPQPKANQQHQDNARGLVLPGYKYLGPGNGLDKGEPVNAADAAALEHDKAYDQQLKAGDNPYLKYNHADAEFQERLKEDTSFGGNLGRAVFQAKKRLLEPLGLVEEAAKTAPGKKRPVEQSPQEPDSSAGIGKSGAQPAKKRLNFGQTGDSESVPDPQPLGEPPAAPSGVGPNTMAAGGGAPMADNNEGADGVGSSSGNWHCDSTWLGDRVITTSTRTWALPTYNNHLYKQISNGTSGGATNDNTYFGYSTPWGYFDFNRFHCHFSPRDWQRLINNNWGFRPKRLSFKLFNIQVKEVTQNEGTKTIANNLTSTIQVFTDSEYQLPYVLGSAHQGCLPPFPADVFMIPQYGYLTLNNGSQAVGRSSFYCLEYFPSQMLRTGNNFQFTYTFEDVPFHSSYAHSQSLDRLMNPLIDQYLYYLSRTQTTSNGRGVTLGFSQGGPNTMANQAKNWLPGPCYRQQRVSTYPLEMPIGNFAWTAGTKYHLNGRNSLANPGIAMATHKDDEERFFPSNGILIFGKQNAARDNADYSDVMLTSEEEIKTTNPVATEEYGIVADNLQQQNTAPQIGTVNSQGALPGMVWQNRDVYLQGPIWAKIPHTDGNFHPSPLMGGFGLKHPPPQILIKNTPVPADPPTTFNQSKLNSFITQYSTGQVSVEIEWELQKENSKRWNPEIQYTSNYYKSTSVDFAVNTEGVYSEPRPIGTRYLTRNL

SEQ ID NO: 518 - protein, 737 aa, Artificial Sequence
  AAV capsid variant
MAADGYLPDWLEDNLSEGIREWWALKPGAPQPKANQQHQDNARGLVLPGYKYLGPGNGLDKGEPVNAADAAALEHDKAYDQQLKAGDNPYLKYNHADAEFQERLKEDTSFGGNLGRAVFQAKKRLLEPLGLVEEAAKTAPGKKRPVEQSPQEPDSSAGIGKSGAQPAKKRLNFGQTGDSESVPDPQPLGEPPAAPSGVGPNTMAAGGGAPMADNNEGADGVGSSSGNWHCDSTWLGDRVITTSTRTWALPTYNNHLYKQISNGTSGGATNDNTYFGYSTPWGYFDFNRFHCHFSPRDWQRLINNNWGFRPKRLSFKLFNIQVKEVTQNEGTKTIANNLTSTIQVFTDSEYQLPYVLGSAHQGCLPPFPADVFMIPQYGYLTLNNGSQAVGRSSFYCLEYFPSQMLRTGNNFQFTYTFEDVPFHSSYAHSQSLDRLMNPLIDQYLYYLSRTQTTSNGRGVTLGFSQGGPNTMANQAKNWLPGPCYRQQRVSTYPLEDMGTINFAWTAGTKYHLNGRNSLANPGIAMATHKDDEERFFPSNGILIFGKQNAARDNADYSDVMLTSEEEIKTTNPVATEEYGIVADNLQQQNTAPQIGTVNSQGALPGMVWQNRDVYLQGPIWAKIPHTDGNFHPSPLMGGFGLKHPPPQILIKNTPVPADPPTTFNQSKLNSFITQYSTGQVSVEIEWELQKENSKRWNPEIQYTSNYYKSTSVDFAVNTEGVYSEPRPIGTRYLTRNL

SEQ ID NO: 519 - protein, 737 aa, Artificial Sequence
  AAV capsid variant
MAADGYLPDWLEDNLSEGIREWWALKPGAPQPKANQQHQDNARGLVLPGYKYLGPGNGLDKGEPVNAADAAALEHDKAYDQQLKAGDNPYLKYNHADAEFQERLKEDTSFGGNLGRAVFQAKKRLLEPLGLVEEAAKTAPGKKRPVEQSPQEPDSSAGIGKSGAQPAKKRLNFGQTGDSESVPDPQPLGEPPAAPSGVGPNTMAAGGGAPMADNNEGADGVGSSSGNWHCDSTWLGDRVITTSTRTWALPTYNNHLYKQISNGTSGGATNDNTYFGYSTPWGYFDFNRFHCHFSPRDWQRLINNNWGFRPKRLSFKLFNIQVKEVTQNEGTKTIANNLTSTIQVFTDSEYQLPYVLGSAHQGCLPPFPADVFMIPQYGYLTLNNGSQAVGRSSFYCLEYFPSQMLRTGNNFQFTYTFEDVPFHSSYAHSQSLDRLMNPLIDQYLYYLSRTQTTGGTANTQTLGFSQGGPNTMANQAKNWLPGPCYRQQRVSTYPLNGGVVNFAWTAGTKYHLNGRNSLANPGIAMATHKDDEERFFPSNGILIFGKQNAARDNADYSDVMLTSEEEIKTTNPVATEEYGIVADNVMEPTRAPQIGTVNSQGALPGMVWQNRDVYLQGPIWAKIPHTDGNFHPSPLMGGFGLKHPPPQILIKNTPVPADPPTTFNQSKLNSFITQYSTGQVSVEIEWELQKENSKRWNPEIQYTSNYYKSTSVDFAVNTEGVYSEPRPIGTRYLTRNL

SEQ ID NO: 520 - protein, 737 aa, Artificial Sequence
  AAV capsid variant
MAADGYLPDWLEDNLSEGIREWWALKPGAPQPKANQQHQDNARGLVLPGYKYLGPGNGLDKGEPVNAADAAALEHDKAYDQQLKAGDNPYLKYNHADAEFQERLKEDTSFGGNLGRAVFQAKKRLLEPLGLVEEAAKTAPGKKRPVEQSPQEPDSSAGIGKSGAQPAKKRLNFGQTGDSESVPDPQPLGEPPAAPSGVGPNTMAAGGGAPMADNNEGADGVGSSSGNWHCDSTWLGDRVITTSTRTWALPTYNNHLYKQISNGTSGGATNDNTYFGYSTPWGYFDFNRFHCHFSPRDWQRLINNNWGFRPKRLSFKLFNIQVKEVTQNEGTKTIANNLTSTIQVFTDSEYQLPYVLGSAHQGCLPPFPADVFMIPQYGYLTLNNGSQAVGRSSFYCLEYFPSQMLRTGNNFQFTYTFEDVPFHSSYAHSQSLDRLMNPLIDQYLYYLSRTQTTGGTANTQTLGFSQGGPNTMANQAKNWLPGPCYRQQRVSTYPLEMPIGNFAWTAGTKYHLNGRNSLANPGIAMATHKDDEERFFPSNGILIFGKQNAARDNADYSDVMLTSEEEIKTTNPVATEEYGIVADNVMEPTRAPQIGTVNSQGALPGMVWQNRDVYLQGPIWAKIPHTDGNFHPSPLMGGFGLKHPPPQILIKNTPVPADPPTTFNQSKLNSFITQYSTGQVSVEIEWELQKENSKRWNPEIQYTSNYYKSTSVDFAVNTEGVYSEPRPIGTRYLTRNL

SEQ ID NO: 521 - protein, 738 aa, Artificial Sequence
  AAV capsid variant
MAADGYLPDWLEDNLSEGIREWWALKPGAPQPKANQQHQDNARGLVLPGYKYLGPGNGLDKGEPVNAADAAALEHDKAYDQQLKAGDNPYLKYNHADAEFQERLKEDTSFGGNLGRAVFQAKKRLLEPLGLVEEAAKTAPGKKRPVEQSPQEPDSSAGIGKSGAQPAKKRLNFGQTGDSESVPDPQPLGEPPAAPSGVGPNTMAAGGGAPMADNNEGADGVGSSSGNWHCDSTWLGDRVITTSTRTWALPTYNNHLYKQISNGTSGGATNDNTYFGYSTPWGYFDFNRFHCHFSPRDWQRLINNNWGFRPKRLSFKLFNIQVKEVTQNEGTKTIANNLTSTIQVFTDSEYQLPYVLGSAHQGCLPPFPADVFMIPQYGYLTLNNGSQAVGRSSFYCLEYFPSQMLRTGNNFQFTYTFEDVPFHSSYAHSQSLDRLMNPLIDQYLYYLSRTQTTGGTANTQTLGFSQGGPNTMANQAKNWLPGPCYRQQRVSTYPLEDMGTINFAWTAGTKYHLNGRNSLANPGIAMATHKDDEERFFPSNGILIFGKQNAARDNADYSDVMLTSEEEIKTTNPVATEEYGIVADNVMEPTRAPQIGTVNSQGALPGMVWQNRDVYLQGPIWAKIPHTDGNFHPSPLMGGFGLKHPPPQILIKNTPVPADPPTTFNQSKLNSFITQYSTGQVSVEIEWELQKENSKRWNPEIQYTSNYYKSTSVDFAVNTEGVYSEPRPIGTRYLTRNL

SEQ ID NO: 522 - protein, 736 aa, Artificial Sequence
  AAV capsid variant
MAADGYLPDWLEDNLSEGIREWWALKPGAPQPKANQQHQDNARGLVLPGYKYLGPGNGLDKGEPVNAADAAALEHDKAYDQQLKAGDNPYLKYNHADAEFQERLKEDTSFGGNLGRAVFQAKKRLLEPLGLVEEAAKTAPGKKRPVEQSPQEPDSSAGIGKSGAQPAKKRLNFGQTGDSESVPDPQPLGEPPAAPSGVGPNTMAAGGGAPMADNNEGADGVGSSSGNWHCDSTWLGDRVITTSTRTWALPTYNNHLYKQISNGTSGGATNDNTYFGYSTPWGYFDFNRFHCHFSPRDWQRLINNNWGFRPKRLSFKLFNIQVKEVTQNEGTKTIANNLTSTIQVFTDSEYQLPYVLGSAHQGCLPPFPADVFMIPQYGYLTLNNGSQAVGRSSFYCLEYFPSQMLRTGNNFQFTYTFEDVPFHSSYAHSQSLDRLMNPLIDQYLYYLSRTQTTSNGRGVTLGFSQGGPNTMANQAKNWLPGPCYRQQRVSTYPLNGGVVNFAWTAGTKYHLNGRNSLANPGIAMATHKDDEERFFPSNGILIFGKQNAARDNADYSDVMLTSEEEIKTTNPVATEEYGIVADNVMEPTRAPQIGTVNSQGALPGMVWQNRDVYLQGPIWAKIPHTDGNFHPSPLMGGFGLKHPPPQILIKNTPVPADPPTTFNQSKLNSFITQYSTGQVSVEIEWELQKENSKRWNPEIQYTSNYYKSTSVDFAVNTEGVYSEPRPIGTRYLTRNL

SEQ ID NO: 523 - protein, 736 aa, Artificial Sequence
  AAV capsid variant
MAADGYLPDWLEDNLSEGIREWWALKPGAPQPKANQQHQDNARGLVLPGYKYLGPGNGLDKGEPVNAADAAALEHDKAYDQQLKAGDNPYLKYNHADAEFQERLKEDTSFGGNLGRAVFQAKKRLLEPLGLVEEAAKTAPGKKRPVEQSPQEPDSSAGIGKSGAQPAKKRLNFGQTGDSESVPDPQPLGEPPAAPSGVGPNTMAAGGGAPMADNNEGADGVGSSSGNWHCDSTWLGDRVITTSTRTWALPTYNNHLYKQISNGTSGGATNDNTYFGYSTPWGYFDFNRFHCHFSPRDWQRLINNNWGFRPKRLSFKLFNIQVKEVTQNEGTKTIANNLTSTIQVFTDSEYQLPYVLGSAHQGCLPPFPADVFMIPQYGYLTLNNGSQAVGRSSFYCLEYFPSQMLRTGNNFQFTYTFEDVPFHSSYAHSQSLDRLMNPLIDQYLYYLSRTQTTSNGRGVTLGFSQGGPNTMANQAKNWLPGPCYRQQRVSTYPLEMPIGNFAWTAGTKYHLNGRNSLANPGIAMATHKDDEERFFPSNGILIFGKQNAARDNADYSDVMLTSEEEIKTTNPVATEEYGIVADNVMEPTRAPQIGTVNSQGALPGMVWQNRDVYLQGPIWAKIPHTDGNFHPSPLMGGFGLKHPPPQILIKNTPVPADPPTTFNQSKLNSFITQYSTGQVSVEIEWELQKENSKRWNPEIQYTSNYYKSTSVDFAVNTEGVYSEPRPIGTRYLTRNL

SEQ ID NO: 524 - protein, 737 aa, Artificial Sequence
  AAV capsid variant
MAADGYLPDWLEDNLSEGIREWWALKPGAPQPKANQQHQDNARGLVLPGYKYLGPGNGLDKGEPVNAADAAALEHDKAYDQQLKAGDNPYLKYNHADAEFQERLKEDTSFGGNLGRAVFQAKKRLLEPLGLVEEAAKTAPGKKRPVEQSPQEPDSSAGIGKSGAQPAKKRLNFGQTGDSESVPDPQPLGEPPAAPSGVGPNTMAAGGGAPMADNNEGADGVGSSSGNWHCDSTWLGDRVITTSTRTWALPTYNNHLYKQISNGTSGGATNDNTYFGYSTPWGYFDFNRFHCHFSPRDWQRLINNNWGFRPKRLSFKLFNIQVKEVTQNEGTKTIANNLTSTIQVFTDSEYQLPYVLGSAHQGCLPPFPADVFMIPQYGYLTLNNGSQAVGRSSFYCLEYFPSQMLRTGNNFQFTYTFEDVPFHSSYAHSQSLDRLMNPLIDQYLYYLSRTQTTSNGRGVTLGFSQGGPNTMANQAKNWLPGPCYRQQRVSTYPLEDMGTINFAWTAGTKYHLNGRNSLANPGIAMATHKDDEERFFPSNGILIFGKQNAARDNADYSDVMLTSEEEIKTTNPVATEEYGIVADNVMEPTRAPQIGTVNSQGALPGMVWQNRDVYLQGPIWAKIPHTDGNFHPSPLMGGFGLKHPPPQILIKNTPVPADPPTTFNQSKLNSFITQYSTGQVSVEIEWELQKENSKRWNPEIQYTSNYYKSTSVDFAVNTEGVYSEPRPIGTRYLTRNL

SEQ ID NO: 525 - protein, 737 aa, Artificial Sequence; identical to SEQ ID NO: 431
  AAV capsid variant

SEQ ID NO: 526 - protein, 738 aa, Artificial Sequence
  AAV capsid variant
MAADGYLPDWLEDNLSEGIREWWALKPGAPKPKANQQKQDDGRGLVLPGYKYLGPFNGLDKGEPVNAADAAALEHDKAYDQQLQAGDNPYLRYNHADAEFQERLQEDTSFGGNLGRAVFQAKKRVLEPLGLVEEGAKTAPGKKRPVEPSPQRSPDSSTGIGKKGQQPARKRLNFGQTGDSESVPDPQPLGEPPAAPSGVGPNTMAAGGGAPMADNNEGADGVGSSSGNWHCDSTWLGDRVITTSTRTWALPTYNNHLYKQISNGTSGGATNDNTYFGYSTPWGYFDFNRFHCHFSPRDWQRLINNNWGFRPKRLSFKLFNIQVKEVTQNEGTKTIANNLTSTIQVFTDSEYQLPYVLGSAHQGCLPPFPADVFMIPQYGYLTLNNGSQAVGRSSFYCLEYFPSQMLRTGNNFQFTYTFEDVPFHSSYAHSQSLDRLMNPLIDQYLYYLSRTQTTGGTANTQTLGFSQGGPNTMANQAKNWLPGPCYRQQRVSTYPLENFKYNFAWTAGTKYHLNGRNSLANPGIAMATHKDDEERFFPSNGILIFGKQNAARDNADYSDVMLTSEEEIKTTNPVATEEYGIVADNLQQQNTAPQIGTVNSQGALPGMVWQNRDVYLQGPIWAKIPHTDGNFHPSPLMGGFGLKHPPPQILIKNTPVPADPRSTFNGDKLNSFITQYSTGQVSVEIEWELQKENSKRWNPEIQYTSNYYKSTSVDFAVNTEGVYSEPRPIGTRYLTRNL

SEQ ID NO: 527 - protein, 738 aa, Artificial Sequence
  AAV capsid variant
MAADGYLPDWLEDNLSEGIREWWALKPGAPKPKANQQKQDDGRGLVLPGYKYLGPFNGLDKGEPVNAADAAALEHDKAYDQQLQAGDNPYLRYNHADAEFQERLQEDTSFGGNLGRAVFQAKKRVLEPLGLVEEGAKTAPGKKRPVEPSPQRSPDSSTGIGKKGQQPARKRLNFGQTGDSESVPDPQPLGEPPAAPSGVGPNTMAAGGGAPMADNNEGADGVGSSSGNWHCDSTWLGDRVITTSTRTWALPTYNNHLYKQISNGTSGGATNDNTYFGYSTPWGYFDFNRFHCHFSPRDWQRLINNNWGFRPKRLSFKLFNIQVKEVTQNEGTKTIANNLTSTIQVFTDSEYQLPYVLGSAHQGCLPPFPADVFMIPQYGYLTLNNGSQAVGRSSFYCLEYFPSQMLRTGNNFQFTYTFEDVPFHSSYAHSQSLDRLMNPLIDQYLYYLSRTQTTGGTANTQTLGFSQGGPNTMANQAKNWLPGPCYRQQRVSTYPLGDHSANFAWTAGTKYHLNGRNSLANPGIAMATHKDDEERFFPSNGILIFGKQNAARDNADYSDVMLTSEEEIKTTNPVATEEYGIVADNLQQQNTAPQIGTVNSQGALPGMVWQNRDVYLQGPIWAKIPHTDGNFHPSPLMGGFGLKHPPPQILIKNTPVPADPRSTFNGDKLNSFITQYSTGQVSVEIEWELQKENSKRWNPEIQYTSNYYKSTSVDFAVNTEGVYSEPRPIGTRYLTRNL

SEQ ID NO: 528 - protein, 738 aa, Artificial Sequence
  AAV capsid variant
MAADGYLPDWLEDNLSEGIREWWALKPGAPKPKANQQKQDDGRGLVLPGYKYLGPFNGLDKGEPVNAADAAALEHDKAYDQQLQAGDNPYLRYNHADAEFQERLQEDTSFGGNLGRAVFQAKKRVLEPLGLVEEGAKTAPGKKRPVEPSPQRSPDSSTGIGKKGQQPARKRLNFGQTGDSESVPDPQPLGEPPAAPSGVGPNTMAAGGGAPMADNNEGADGVGSSSGNWHCDSTWLGDRVITTSTRTWALPTYNNHLYKQISNGTSGGATNDNTYFGYSTPWGYFDFNRFHCHFSPRDWQRLINNNWGFRPKRLSFKLFNIQVKEVTQNEGTKTIANNLTSTIQVFTDSEYQLPYVLGSAHQGCLPPFPADVFMIPQYGYLTLNNGSQAVGRSSFYCLEYFPSQMLRTGNNFQFTYTFEDVPFHSSYAHSQSLDRLMNPLIDQYLYYLSRTQTTGGTANTQTLGFSQGGPNTMANQAKNWLPGPCYRQQRVSTYPLASGSGNFAWTAGTKYHLNGRNSLANPGIAMATHKDDEERFFPSNGILIFGKQNAARDNADYSDVMLTSEEEIKTTNPVATEEYGIVADNLQQQNTAPQIGTVNSQGALPGMVWQNRDVYLQGPIWAKIPHTDGNFHPSPLMGGFGLKHPPPQILIKNTPVPADPRSTFNGDKLNSFITQYSTGQVSVEIEWELQKENSKRWNPEIQYTSNYYKSTSVDFAVNTEGVYSEPRPIGTRYLTRNL

SEQ ID NO: 529 - protein, 738 aa, Artificial Sequence
  AAV capsid variant
MAADGYLPDWLEDNLSEGIREWWALKPGAPKPKANQQKQDDGRGLVLPGYKYLGPFNGLDKGEPVNAADAAALEHDKAYDQQLQAGDNPYLRYNHADAEFQERLQEDTSFGGNLGRAVFQAKKRVLEPLGLVEEGAKTAPGKKRPVEPSPQRSPDSSTGIGKKGQQPARKRLNFGQTGDSESVPDPQPLGEPPAAPSGVGPNTMAAGGGAPMADNNEGADGVGSSSGNWHCDSTWLGDRVITTSTRTWALPTYNNHLYKQISNGTSGGATNDNTYFGYSTPWGYFDFNRFHCHFSPRDWQRLINNNWGFRPKRLSFKLFNIQVKEVTQNEGTKTIANNLTSTIQVFTDSEYQLPYVLGSAHQGCLPPFPADVFMIPQYGYLTLNNGSQAVGRSSFYCLEYFPSQMLRTGNNFQFTYTFEDVPFHSSYAHSQSLDRLMNPLIDQYLYYLSRTQTTGGTANTQTLGFSQGGPNTMANQAKNWLPGPCYRQQRVSTYPLLGKEQNFAWTAGTKYHLNGRNSLANPGIAMATHKDDEERFFPSNGILIFGKQNAARDNADYSDVMLTSEEEIKTTNPVATEEYGIVADNLQQQNTAPQIGTVNSQGALPGMVWQNRDVYLQGPIWAKIPHTDGNFHPSPLMGGFGLKHPPPQILIKNTPVPADPRSTFNGDKLNSFITQYSTGQVSVEIEWELQKENSKRWNPEIQYTSNYYKSTSVDFAVNTEGVYSEPRPIGTRYLTRNL

SEQ ID NO: 530 - protein, 738 aa, Artificial Sequence
  AAV capsid variant
MAADGYLPDWLEDNLSEGIREWWALKPGAPKPKANQQKQDDGRGLVLPGYKYLGPFNGLDKGEPVNAADAAALEHDKAYDQQLQAGDNPYLRYNHADAEFQERLQEDTSFGGNLGRAVFQAKKRVLEPLGLVEEGAKTAPGKKRPVEPSPQRSPDSSTGIGKKGQQPARKRLNFGQTGDSESVPDPQPLGEPPAAPSGVGPNTMAAGGGAPMADNNEGADGVGSSSGNWHCDSTWLGDRVITTSTRTWALPTYNNHLYKQISNGTSGGATNDNTYFGYSTPWGYFDFNRFHCHFSPRDWQRLINNNWGFRPKRLSFKLFNIQVKEVTQNEGTKTIANNLTSTIQVFTDSEYQLPYVLGSAHQGCLPPFPADVFMIPQYGYLTLNNGSQAVGRSSFYCLEYFPSQMLRTGNNFQFTYTFEDVPFHSSYAHSQSLDRLMNPLIDQYLYYLSRTQTTGGTANTQTLGFSQGGPNTMANQAKNWLPGPCYRQQRVSTYPLSGTNQNFAWTAGTKYHLNGRNSLANPGIAMATHKDDEERFFPSNGILIFGKQNAARDNADYSDVMLTSEEEIKTTNPVATEEYGIVADNLQQQNTAPQIGTVNSQGALPGMVWQNRDVYLQGPIWAKIPHTDGNFHPSPLMGGFGLKHPPPQILIKNTPVPADPRSTFNGDKLNSFITQYSTGQVSVEIEWELQKENSKRWNPEIQYTSNYYKSTSVDFAVNTEGVYSEPRPIGTRYLTRNL

SEQ ID NO: 531 - protein, 738 aa, Artificial Sequence
  AAV capsid variant
MAADGYLPDWLEDNLSEGIREWWALKPGAPKPKANQQKQDDGRGLVLPGYKYLGPFNGLDKGEPVNAADAAALEHDKAYDQQLQAGDNPYLRYNHADAEFQERLQEDTSFGGNLGRAVFQAKKRVLEPLGLVEEGAKTAPGKKRPVEPSPQRSPDSSTGIGKKGQQPARKRLNFGQTGDSESVPDPQPLGEPPAAPSGVGPNTMAAGGGAPMADNNEGADGVGSSSGNWHCDSTWLGDRVITTSTRTWALPTYNNHLYKQISNGTSGGATNDNTYFGYSTPWGYFDFNRFHCHFSPRDWQRLINNNWGFRPKRLSFKLFNIQVKEVTQNEGTKTIANNLTSTIQVFTDSEYQLPYVLGSAHQGCLPPFPADVFMIPQYGYLTLNNGSQAVGRSSFYCLEYFPSQMLRTGNNFQFTYTFEDVPFHSSYAHSQSLDRLMNPLIDQYLYYLSRTQTTGGTANTQTLGFSQGGPNTMANQAKNWLPGPCYRQQRVSTYPLRDGQLNFAWTAGTKYHLNGRNSLANPGIAMATHKDDEERFFPSNGILIFGKQNAARDNADYSDVMLTSEEEIKTTNPVATEEYGIVADNLQQQNTAPQIGTVNSQGALPGMVWQNRDVYLQGPIWAKIPHTDGNFHPSPLMGGFGLKHPPPQILIKNTPVPADPRSTFNGDKLNSFITQYSTGQVSVEIEWELQKENSKRWNPEIQYTSNYYKSTSVDFAVNTEGVYSEPRPIGTRYLTRNL

SEQ ID NO: 532 - protein, 738 aa, Artificial Sequence
  AAV capsid variant
MAADGYLPDWLEDNLSEGIREWWALKPGAPKPKANQQKQDDGRGLVLPGYKYLGPFNGLDKGEPVNAADAAALEHDKAYDQQLQAGDNPYLRYNHADAEFQERLQEDTSFGGNLGRAVFQAKKRVLEPLGLVEEGAKTAPGKKRPVEPSPQRSPDSSTGIGKKGQQPARKRLNFGQTGDSESVPDPQPLGEPPAAPSGVGPNTMAAGGGAPMADNNEGADGVGSSSGNWHCDSTWLGDRVITTSTRTWALPTYNNHLYKQISNGTSGGATNDNTYFGYSTPWGYFDFNRFHCHFSPRDWQRLINNNWGFRPKRLSFKLFNIQVKEVTQNEGTKTIANNLTSTIQVFTDSEYQLPYVLGSAHQGCLPPFPADVFMIPQYGYLTLNNGSQAVGRSSFYCLEYFPSQMLRTGNNFQFTYTFEDVPFHSSYAHSQSLDRLMNPLIDQYLYYLSRTQTTGGTANTQTLGFSQGGPNTMANQAKNWLPGPCYRQQRVSTYPLADTGTNFAWTAGTKYHLNGRNSLANPGIAMATHKDDEERFFPSNGILIFGKQNAARDNADYSDVMLTSEEEIKTTNPVATEEYGIVADNLQQQNTAPQIGTVNSQGALPGMVWQNRDVYLQGPIWAKIPHTDGNFHPSPLMGGFGLKHPPPQILIKNTPVPADPRSTFNGDKLNSFITQYSTGQVSVEIEWELQKENSKRWNPEIQYTSNYYKSTSVDFAVNTEGVYSEPRPIGTRYLTRNL

SEQ ID NO: 533 - protein, 738 aa, Artificial Sequence; identical to SEQ ID NO: 432
  AAV capsid variant

SEQ ID NO: 534 - protein, 737 aa, Artificial Sequence; identical to SEQ ID NO: 433
  AAV capsid variant

SEQ ID NO: 535 - protein, 737 aa, Artificial Sequence
  AAV capsid variant
MAADGYLPDWLEDNLSEGIREWWALKPGAPKPKANQQKQDDGRGLVLPGYKYLGPFNGLDKGEPVNAADAAALEHDKAYDQQLQAGDNPYLRYNHADAEFQERLQEDTSFGGNLGRAVFQAKKRVLEPLGLVEEGAKTAPGKKRPVEPSPQRSPDSSTGIGKKGQQPARKRLNFGQTGDSESVPDPQPLGEPPAAPSGVGPNTMAAGGGAPMADNNEGADGVGSSSGNWHCDSTWLGDRVITTSTRTWALPTYNNHLYKQISNGTSGGATNDNTYFGYSTPWGYFDFNRFHCHFSPRDWQRLINNNWGFRPKRLSFKLFNIQVKEVTQNEGTKTIANNLTSTIQVFTDSEYQLPYVLGSAHQGCLPPFPADVFMIPQYGYLTLNNGSQAVGRSSFYCLEYFPSQMLRTGNNFQFTYTFEDVPFHSSYAHSQSLDRLMNPLIDQYLYYLSRTQTTSNGRGVTLGFSQGGPNTMANQAKNWLPGPCYRQQRVSTYPLENFKYNFAWTAGTKYHLNGRNSLANPGIAMATHKDDEERFFPSNGILIFGKQNAARDNADYSDVMLTSEEEIKTTNPVATEEYGIVADNLQQQNTAPQIGTVNSQGALPGMVWQNRDVYLQGPIWAKIPHTDGNFHPSPLMGGFGLKHPPPQILIKNTPVPADPRSTFNGDKLNSFITQYSTGQVSVEIEWELQKENSKRWNPEIQYTSNYYKSTSVDFAVNTEGVYSEPRPIGTRYLTRNL

SEQ ID NO: 536 - protein, 737 aa, Artificial Sequence
  AAV capsid variant
MAADGYLPDWLEDNLSEGIREWWALKPGAPKPKANQQKQDDGRGLVLPGYKYLGPFNGLDKGEPVNAADAAALEHDKAYDQQLQAGDNPYLRYNHADAEFQERLQEDTSFGGNLGRAVFQAKKRVLEPLGLVEEGAKTAPGKKRPVEPSPQRSPDSSTGIGKKGQQPARKRLNFGQTGDSESVPDPQPLGEPPAAPSGVGPNTMAAGGGAPMADNNEGADGVGSSSGNWHCDSTWLGDRVITTSTRTWALPTYNNHLYKQISNGTSGGATNDNTYFGYSTPWGYFDFNRFHCHFSPRDWQRLINNNWGFRPKRLSFKLFNIQVKEVTQNEGTKTIANNLTSTIQVFTDSEYQLPYVLGSAHQGCLPPFPADVFMIPQYGYLTLNNGSQAVGRSSFYCLEYFPSQMLRTGNNFQFTYTFEDVPFHSSYAHSQSLDRLMNPLIDQYLYYLSRTQTTSNGRGVTLGFSQGGPNTMANQAKNWLPGPCYRQQRVSTYPLGDHSANFAWTAGTKYHLNGRNSLANPGIAMATHKDDEERFFPSNGILIFGKQNAARDNADYSDVMLTSEEEIKTTNPVATEEYGIVADNLQQQNTAPQIGTVNSQGALPGMVWQNRDVYLQGPIWAKIPHTDGNFHPSPLMGGFGLKHPPPQILIKNTPVPADPRSTFNGDKLNSFITQYSTGQVSVEIEWELQKENSKRWNPEIQYTSNYYKSTSVDFAVNTEGVYSEPRPIGTRYLTRNL

SEQ ID NO: 537 - protein, 737 aa, Artificial Sequence
  AAV capsid variant
MAADGYLPDWLEDNLSEGIREWWALKPGAPKPKANQQKQDDGRGLVLPGYKYLGPFNGLDKGEPVNAADAAALEHDKAYDQQLQAGDNPYLRYNHADAEFQERLQEDTSFGGNLGRAVFQAKKRVLEPLGLVEEGAKTAPGKKRPVEPSPQRSPDSSTGIGKKGQQPARKRLNFGQTGDSESVPDPQPLGEPPAAPSGVGPNTMAAGGGAPMADNNEGADGVGSSSGNWHCDSTWLGDRVITTSTRTWALPTYNNHLYKQISNGTSGGATNDNTYFGYSTPWGYFDFNRFHCHFSPRDWQRLINNNWGFRPKRLSFKLFNIQVKEVTQNEGTKTIANNLTSTIQVFTDSEYQLPYVLGSAHQGCLPPFPADVFMIPQYGYLTLNNGSQAVGRSSFYCLEYFPSQMLRTGNNFQFTYTFEDVPFHSSYAHSQSLDRLMNPLIDQYLYYLSRTQTTSNGRGVTLGFSQGGPNTMANQAKNWLPGPCYRQQRVSTYPLASGSGNFAWTAGTKYHLNGRNSLANPGIAMATHKDDEERFFPSNGILIFGKQNAARDNADYSDVMLTSEEEIKTTNPVATEEYGIVADNLQQQNTAPQIGTVNSQGALPGMVWQNRDVYLQGPIWAKIPHTDGNFHPSPLMGGFGLKHPPPQILIKNTPVPADPRSTFNGDKLNSFITQYSTGQVSVEIEWELQKENSKRWNPEIQYTSNYYKSTSVDFAVNTEGVYSEPRPIGTRYLTRNL

SEQ ID NO: 538 - protein, 737 aa, Artificial Sequence
  AAV capsid variant
MAADGYLPDWLEDNLSEGIREWWALKPGAPKPKANQQKQDDGRGLVLPGYKYLGPFNGLDKGEPVNAADAAALEHDKAYDQQLQAGDNPYLRYNHADAEFQERLQEDTSFGGNLGRAVFQAKKRVLEPLGLVEEGAKTAPGKKRPVEPSPQRSPDSSTGIGKKGQQPARKRLNFGQTGDSESVPDPQPLGEPPAAPSGVGPNTMAAGGGAPMADNNEGADGVGSSSGNWHCDSTWLGDRVITTSTRTWALPTYNNHLYKQISNGTSGGATNDNTYFGYSTPWGYFDFNRFHCHFSPRDWQRLINNNWGFRPKRLSFKLFNIQVKEVTQNEGTKTIANNLTSTIQVFTDSEYQLPYVLGSAHQGCLPPFPADVFMIPQYGYLTLNNGSQAVGRSSFYCLEYFPSQMLRTGNNFQFTYTFEDVPFHSSYAHSQSLDRLMNPLIDQYLYYLSRTQTTSNGRGVTLGFSQGGPNTMANQAKNWLPGPCYRQQRVSTYPLLGKEQNFAWTAGTKYHLNGRNSLANPGIAMATHKDDEERFFPSNGILIFGKQNAARDNADYSDVMLTSEEEIKTTNPVATEEYGIVADNLQQQNTAPQIGTVNSQGALPGMVWQNRDVYLQGPIWAKIPHTDGNFHPSPLMGGFGLKHPPPQILIKNTPVPADPRSTFNGDKLNSFITQYSTGQVSVEIEWELQKENSKRWNPEIQYTSNYYKSTSVDFAVNTEGVYSEPRPIGTRYLTRNL

SEQ ID NO: 539 - protein, 737 aa, Artificial Sequence
  AAV capsid variant
MAADGYLPDWLEDNLSEGIREWWALKPGAPKPKANQQKQDDGRGLVLPGYKYLGPFNGLDKGEPVNAADAAALEHDKAYDQQLQAGDNPYLRYNHADAEFQERLQEDTSFGGNLGRAVFQAKKRVLEPLGLVEEGAKTAPGKKRPVEPSPQRSPDSSTGIGKKGQQPARKRLNFGQTGDSESVPDPQPLGEPPAAPSGVGPNTMAAGGGAPMADNNEGADGVGSSSGNWHCDSTWLGDRVITTSTRTWALPTYNNHLYKQISNGTSGGATNDNTYFGYSTPWGYFDFNRFHCHFSPRDWQRLINNNWGFRPKRLSFKLFNIQVKEVTQNEGTKTIANNLTSTIQVFTDSEYQLPYVLGSAHQGCLPPFPADVFMIPQYGYLTLNNGSQAVGRSSFYCLEYFPSQMLRTGNNFQFTYTFEDVPFHSSYAHSQSLDRLMNPLIDQYLYYLSRTQTTSNGRGVTLGFSQGGPNTMANQAKNWLPGPCYRQQRVSTYPLSGTNQNFAWTAGTKYHLNGRNSLANPGIAMATHKDDEERFFPSNGILIFGKQNAARDNADYSDVMLTSEEEIKTTNPVATEEYGIVADNLQQQNTAPQIGTVNSQGALPGMVWQNRDVYLQGPIWAKIPHTDGNFHPSPLMGGFGLKHPPPQILIKNTPVPADPRSTFNGDKLNSFITQYSTGQVSVEIEWELQKENSKRWNPEIQYTSNYYKSTSVDFAVNTEGVYSEPRPIGTRYLTRNL

SEQ ID NO: 540 - protein, 737 aa, Artificial Sequence
  AAV capsid variant
MAADGYLPDWLEDNLSEGIREWWALKPGAPKPKANQQKQDDGRGLVLPGYKYLGPFNGLDKGEPVNAADAAALEHDKAYDQQLQAGDNPYLRYNHADAEFQERLQEDTSFGGNLGRAVFQAKKRVLEPLGLVEEGAKTAPGKKRPVEPSPQRSPDSSTGIGKKGQQPARKRLNFGQTGDSESVPDPQPLGEPPAAPSGVGPNTMAAGGGAPMADNNEGADGVGSSSGNWHCDSTWLGDRVITTSTRTWALPTYNNHLYKQISNGTSGGATNDNTYFGYSTPWGYFDFNRFHCHFSPRDWQRLINNNWGFRPKRLSFKLFNIQVKEVTQNEGTKTIANNLTSTIQVFTDSEYQLPYVLGSAHQGCLPPFPADVFMIPQYGYLTLNNGSQAVGRSSFYCLEYFPSQMLRTGNNFQFTYTFEDVPFHSSYAHSQSLDRLMNPLIDQYLYYLSRTQTTSNGRGVTLGFSQGGPNTMANQAKNWLPGPCYRQQRVSTYPLRDGQLNFAWTAGTKYHLNGRNSLANPGIAMATHKDDEERFFPSNGILIFGKQNAARDNADYSDVMLTSEEEIKTTNPVATEEYGIVADNLQQQNTAPQIGTVNSQGALPGMVWQNRDVYLQGPIWAKIPHTDGNFHPSPLMGGFGLKHPPPQILIKNTPVPADPRSTFNGDKLNSFITQYSTGQVSVEIEWELQKENSKRWNPEIQYTSNYYKSTSVDFAVNTEGVYSEPRPIGTRYLTRNL

SEQ ID NO: 541 - protein, 737 aa, Artificial Sequence
  AAV capsid variant
MAADGYLPDWLEDNLSEGIREWWALKPGAPKPKANQQKQDDGRGLVLPGYKYLGPFNGLDKGEPVNAADAAALEHDKAYDQQLQAGDNPYLRYNHADAEFQERLQEDTSFGGNLGRAVFQAKKRVLEPLGLVEEGAKTAPGKKRPVEPSPQRSPDSSTGIGKKGQQPARKRLNFGQTGDSESVPDPQPLGEPPAAPSGVGPNTMAAGGGAPMADNNEGADGVGSSSGNWHCDSTWLGDRVITTSTRTWALPTYNNHLYKQISNGTSGGATNDNTYFGYSTPWGYFDFNRFHCHFSPRDWQRLINNNWGFRPKRLSFKLFNIQVKEVTQNEGTKTIANNLTSTIQVFTDSEYQLPYVLGSAHQGCLPPFPADVFMIPQYGYLTLNNGSQAVGRSSFYCLEYFPSQMLRTGNNFQFTYTFEDVPFHSSYAHSQSLDRLMNPLIDQYLYYLSRTQTTSNGRGVTLGFSQGGPNTMANQAKNWLPGPCYRQQRVSTYPLADTGTNFAWTAGTKYHLNGRNSLANPGIAMATHKDDEERFFPSNGILIFGKQNAARDNADYSDVMLTSEEEIKTTNPVATEEYGIVADNLQQQNTAPQIGTVNSQGALPGMVWQNRDVYLQGPIWAKIPHTDGNFHPSPLMGGFGLKHPPPQILIKNTPVPADPRSTFNGDKLNSFITQYSTGQVSVEIEWELQKENSKRWNPEIQYTSNYYKSTSVDFAVNTEGVYSEPRPIGTRYLTRNL

SEQ ID NO: 542 - protein, 738 aa, Artificial Sequence
  AAV capsid variant
MAADGYLPDWLEDNLSEGIREWWALKPGAPKPKANQQKQDDGRGLVLPGYKYLGPFNGLDKGEPVNAADAAALEHDKAYDQQLQAGDNPYLRYNHADAEFQERLQEDTSFGGNLGRAVFQAKKRVLEPLGLVEEGAKTAPGKKRPVEPSPQRSPDSSTGIGKKGQQPARKRLNFGQTGDSESVPDPQPLGEPPAAPSGVGPNTMAAGGGAPMADNNEGADGVGSSSGNWHCDSTWLGDRVITTSTRTWALPTYNNHLYKQISNGTSGGATNDNTYFGYSTPWGYFDFNRFHCHFSPRDWQRLINNNWGFRPKRLSFKLFNIQVKEVTQNEGTKTIANNLTSTIQVFTDSEYQLPYVLGSAHQGCLPPFPADVFMIPQYGYLTLNNGSQAVGRSSFYCLEYFPSQMLRTGNNFQFTYTFEDVPFHSSYAHSQSLDRLMNPLIDQYLYYLSRTQTTGGTANTQTLGFSQGGPNTMANQAKNWLPGPCYRQQRVSTYPLENFKYNFAWTAGTKYHLNGRNSLANPGIAMATHKDDEERFFPSNGILIFGKQNAARDNADYSDVMLTSEEEIKTTNPVATEEYGIVADNVMEPTRAPQIGTVNSQGALPGMVWQNRDVYLQGPIWAKIPHTDGNFHPSPLMGGFGLKHPPPQILIKNTPVPADPRSTFNGDKLNSFITQYSTGQVSVEIEWELQKENSKRWNPEIQYTSNYYKSTSVDFAVNTEGVYSEPRPIGTRYLTRNL

SEQ ID NO: 543 - protein, 738 aa, Artificial Sequence
  AAV capsid variant
MAADGYLPDWLEDNLSEGIREWWALKPGAPKPKANQQKQDDGRGLVLPGYKYLGPFNGLDKGEPVNAADAAALEHDKAYDQQLQAGDNPYLRYNHADAEFQERLQEDTSFGGNLGRAVFQAKKRVLEPLGLVEEGAKTAPGKKRPVEPSPQRSPDSSTGIGKKGQQPARKRLNFGQTGDSESVPDPQPLGEPPAAPSGVGPNTMAAGGGAPMADNNEGADGVGSSSGNWHCDSTWLGDRVITTSTRTWALPTYNNHLYKQISNGTSGGATNDNTYFGYSTPWGYFDFNRFHCHFSPRDWQRLINNNWGFRPKRLSFKLFNIQVKEVTQNEGTKTIANNLTSTIQVFTDSEYQLPYVLGSAHQGCLPPFPADVFMIPQYGYLTLNNGSQAVGRSSFYCLEYFPSQMLRTGNNFQFTYTFEDVPFHSSYAHSQSLDRLMNPLIDQYLYYLSRTQTTGGTANTQTLGFSQGGPNTMANQAKNWLPGPCYRQQRVSTYPLGDHSANFAWTAGTKYHLNGRNSLANPGIAMATHKDDEERFFPSNGILIFGKQNAARDNADYSDVMLTSEEEIKTTNPVATEEYGIVADNVMEPTRAPQIGTVNSQGALPGMVWQNRDVYLQGPIWAKIPHTDGNFHPSPLMGGFGLKHPPPQILIKNTPVPADPRSTFNGDKLNSFITQYSTGQVSVEIEWELQKENSKRWNPEIQYTSNYYKSTSVDFAVNTEGVYSEPRPIGTRYLTRNL

SEQ ID NO: 544 - protein, 738 aa, Artificial Sequence
  AAV capsid variant
MAADGYLPDWLEDNLSEGIREWWALKPGAPKPKANQQKQDDGRGLVLPGYKYLGPFNGLDKGEPVNAADAAALEHDKAYDQQLQAGDNPYLRYNHADAEFQERLQEDTSFGGNLGRAVFQAKKRVLEPLGLVEEGAKTAPGKKRPVEPSPQRSPDSSTGIGKKGQQPARKRLNFGQTGDSESVPDPQPLGEPPAAPSGVGPNTMAAGGGAPMADNNEGADGVGSSSGNWHCDSTWLGDRVITTSTRTWALPTYNNHLYKQISNGTSGGATNDNTYFGYSTPWGYFDFNRFHCHFSPRDWQRLINNNWGFRPKRLSFKLFNIQVKEVTQNEGTKTIANNLTSTIQVFTDSEYQLPYVLGSAHQGCLPPFPADVFMIPQYGYLTLNNGSQAVGRSSFYCLEYFPSQMLRTGNNFQFTYTFEDVPFHSSYAHSQSLDRLMNPLIDQYLYYLSRTQTTGGTANTQTLGFSQGGPNTMANQAKNWLPGPCYRQQRVSTYPLASGSGNFAWTAGTKYHLNGRNSLANPGIAMATHKDDEERFFPSNGILIFGKQNAARDNADYSDVMLTSEEEIKTTNPVATEEYGIVADNVMEPTRAPQIGTVNSQGALPGMVWQNRDVYLQGPIWAKIPHTDGNFHPSPLMGGFGLKHPPPQILIKNTPVPADPRSTFNGDKLNSFITQYSTGQVSVEIEWELQKENSKRWNPEIQYTSNYYKSTSVDFAVNTEGVYSEPRPIGTRYLTRNL

SEQ ID NO: 545 - protein, 738 aa, Artificial Sequence
  AAV capsid variant
MAADGYLPDWLEDNLSEGIREWWALKPGAPKPKANQQKQDDGRGLVLPGYKYLGPFNGLDKGEPVNAADAAALEHDKAYDQQLQAGDNPYLRYNHADAEFQERLQEDTSFGGNLGRAVFQAKKRVLEPLGLVEEGAKTAPGKKRPVEPSPQRSPDSSTGIGKKGQQPARKRLNFGQTGDSESVPDPQPLGEPPAAPSGVGPNTMAAGGGAPMADNNEGADGVGSSSGNWHCDSTWLGDRVITTSTRTWALPTYNNHLYKQISNGTSGGATNDNTYFGYSTPWGYFDFNRFHCHFSPRDWQRLINNNWGFRPKRLSFKLFNIQVKEVTQNEGTKTIANNLTSTIQVFTDSEYQLPYVLGSAHQGCLPPFPADVFMIPQYGYLTLNNGSQAVGRSSFYCLEYFPSQMLRTGNNFQFTYTFEDVPFHSSYAHSQSLDRLMNPLIDQYLYYLSRTQTTGGTANTQTLGFSQGGPNTMANQAKNWLPGPCYRQQRVSTYPLLGKEQNFAWTAGTKYHLNGRNSLANPGIAMATHKDDEERFFPSNGILIFGKQNAARDNADYSDVMLTSEEEIKTTNPVATEEYGIVADNVMEPTRAPQIGTVNSQGALPGMVWQNRDVYLQGPIWAKIPHTDGNFHPSPLMGGFGLKHPPPQILIKNTPVPADPRSTFNGDKLNSFITQYSTGQVSVEIEWELQKENSKRWNPEIQYTSNYYKSTSVDFAVNTEGVYSEPRPIGTRYLTRNL

SEQ ID NO: 546 - protein, 738 aa, Artificial Sequence
  AAV capsid variant
MAADGYLPDWLEDNLSEGIREWWALKPGAPKPKANQQKQDDGRGLVLPGYKYLGPFNGLDKGEPVNAADAAALEHDKAYDQQLQAGDNPYLRYNHADAEFQERLQEDTSFGGNLGRAVFQAKKRVLEPLGLVEEGAKTAPGKKRPVEPSPQRSPDSSTGIGKKGQQPARKRLNFGQTGDSESVPDPQPLGEPPAAPSGVGPNTMAAGGGAPMADNNEGADGVGSSSGNWHCDSTWLGDRVITTSTRTWALPTYNNHLYKQISNGTSGGATNDNTYFGYSTPWGYFDFNRFHCHFSPRDWQRLINNNWGFRPKRLSFKLFNIQVKEVTQNEGTKTIANNLTSTIQVFTDSEYQLPYVLGSAHQGCLPPFPADVFMIPQYGYLTLNNGSQAVGRSSFYCLEYFPSQMLRTGNNFQFTYTFEDVPFHSSYAHSQSLDRLMNPLIDQYLYYLSRTQTTGGTANTQTLGFSQGGPNTMANQAKNWLPGPCYRQQRVSTYPLSGTNQNFAWTAGTKYHLNGRNSLANPGIAMATHKDDEERFFPSNGILIFGKQNAARDNADYSDVMLTSEEEIKTTNPVATEEYGIVADNVMEPTRAPQIGTVNSQGALPGMVWQNRDVYLQGPIWAKIPHTDGNFHPSPLMGGFGLKHPPPQILIKNTPVPADPRSTFNGDKLNSFITQYSTGQVSVEIEWELQKENSKRWNPEIQYTSNYYKSTSVDFAVNTEGVYSEPRPIGTRYLTRNL

SEQ ID NO: 547 - protein, 738 aa, Artificial Sequence
  AAV capsid variant
MAADGYLPDWLEDNLSEGIREWWALKPGAPKPKANQQKQDDGRGLVLPGYKYLGPFNGLDKGEPVNAADAAALEHDKAYDQQLQAGDNPYLRYNHADAEFQERLQEDTSFGGNLGRAVFQAKKRVLEPLGLVEEGAKTAPGKKRPVEPSPQRSPDSSTGIGKKGQQPARKRLNFGQTGDSESVPDPQPLGEPPAAPSGVGPNTMAAGGGAPMADNNEGADGVGSSSGNWHCDSTWLGDRVITTSTRTWALPTYNNHLYKQISNGTSGGATNDNTYFGYSTPWGYFDFNRFHCHFSPRDWQRLINNNWGFRPKRLSFKLFNIQVKEVTQNEGTKTIANNLTSTIQVFTDSEYQLPYVLGSAHQGCLPPFPADVFMIPQYGYLTLNNGSQAVGRSSFYCLEYFPSQMLRTGNNFQFTYTFEDVPFHSSYAHSQSLDRLMNPLIDQYLYYLSRTQTTGGTANTQTLGFSQGGPNTMANQAKNWLPGPCYRQQRVSTYPLRDGQLNFAWTAGTKYHLNGRNSLANPGIAMATHKDDEERFFPSNGILIFGKQNAARDNADYSDVMLTSEEEIKTTNPVATEEYGIVADNVMEPTRAPQIGTVNSQGALPGMVWQNRDVYLQGPIWAKIPHTDGNFHPSPLMGGFGLKHPPPQILIKNTPVPADPRSTFNGDKLNSFITQYSTGQVSVEIEWELQKENSKRWNPEIQYTSNYYKSTSVDFAVNTEGVYSEPRPIGTRYLTRNL

SEQ ID NO: 548 - protein, 738 aa, Artificial Sequence
  AAV capsid variant
MAADGYLPDWLEDNLSEGIREWWALKPGAPKPKANQQKQDDGRGLVLPGYKYLGPFNGLDKGEPVNAADAAALEHDKAYDQQLQAGDNPYLRYNHADAEFQERLQEDTSFGGNLGRAVFQAKKRVLEPLGLVEEGAKTAPGKKRPVEPSPQRSPDSSTGIGKKGQQPARKRLNFGQTGDSESVPDPQPLGEPPAAPSGVGPNTMAAGGGAPMADNNEGADGVGSSSGNWHCDSTWLGDRVITTSTRTWALPTYNNHLYKQISNGTSGGATNDNTYFGYSTPWGYFDFNRFHCHFSPRDWQRLINNNWGFRPKRLSFKLFNIQVKEVTQNEGTKTIANNLTSTIQVFTDSEYQLPYVLGSAHQGCLPPFPADVFMIPQYGYLTLNNGSQAVGRSSFYCLEYFPSQMLRTGNNFQFTYTFEDVPFHSSYAHSQSLDRLMNPLIDQYLYYLSRTQTTGGTANTQTLGFSQGGPNTMANQAKNWLPGPCYRQQRVSTYPLADTGTNFAWTAGTKYHLNGRNSLANPGIAMATHKDDEERFFPSNGILIFGKQNAARDNADYSDVMLTSEEEIKTTNPVATEEYGIVADNVMEPTRAPQIGTVNSQGALPGMVWQNRDVYLQGPIWAKIPHTDGNFHPSPLMGGFGLKHPPPQILIKNTPVPADPRSTFNGDKLNSFITQYSTGQVSVEIEWELQKENSKRWNPEIQYTSNYYKSTSVDFAVNTEGVYSEPRPIGTRYLTRNL

SEQ ID NO: 549 - protein, 737 aa, Artificial Sequence
  AAV capsid variant
MAADGYLPDWLEDNLSEGIREWWALKPGAPKPKANQQKQDDGRGLVLPGYKYLGPFNGLDKGEPVNAADAAALEHDKAYDQQLQAGDNPYLRYNHADAEFQERLQEDTSFGGNLGRAVFQAKKRVLEPLGLVEEGAKTAPGKKRPVEPSPQRSPDSSTGIGKKGQQPARKRLNFGQTGDSESVPDPQPLGEPPAAPSGVGPNTMAAGGGAPMADNNEGADGVGSSSGNWHCDSTWLGDRVITTSTRTWALPTYNNHLYKQISNGTSGGATNDNTYFGYSTPWGYFDFNRFHCHFSPRDWQRLINNNWGFRPKRLSFKLFNIQVKEVTQNEGTKTIANNLTSTIQVFTDSEYQLPYVLGSAHQGCLPPFPADVFMIPQYGYLTLNNGSQAVGRSSFYCLEYFPSQMLRTGNNFQFTYTFEDVPFHSSYAHSQSLDRLMNPLIDQYLYYLSRTQTTSNGRGVTLGFSQGGPNTMANQAKNWLPGPCYRQQRVSTYPLENFKYNFAWTAGTKYHLNGRNSLANPGIAMATHKDDEERFFPSNGILIFGKQNAARDNADYSDVMLTSEEEIKTTNPVATEEYGIVADNVMEPTRAPQIGTVNSQGALPGMVWQNRDVYLQGPIWAKIPHTDGNFHPSPLMGGFGLKHPPPQILIKNTPVPADPRSTFNGDKLNSFITQYSTGQVSVEIEWELQKENSKRWNPEIQYTSNYYKSTSVDFAVNTEGVYSEPRPIGTRYLTRNL

SEQ ID NO: 550 - protein, 737 aa, Artificial Sequence
  AAV capsid variant
MAADGYLPDWLEDNLSEGIREWWALKPGAPKPKANQQKQDDGRGLVLPGYKYLGPFNGLDKGEPVNAADAAALEHDKAYDQQLQAGDNPYLRYNHADAEFQERLQEDTSFGGNLGRAVFQAKKRVLEPLGLVEEGAKTAPGKKRPVEPSPQRSPDSSTGIGKKGQQPARKRLNFGQTGDSESVPDPQPLGEPPAAPSGVGPNTMAAGGGAPMADNNEGADGVGSSSGNWHCDSTWLGDRVITTSTRTWALPTYNNHLYKQISNGTSGGATNDNTYFGYSTPWGYFDFNRFHCHFSPRDWQRLINNNWGFRPKRLSFKLFNIQVKEVTQNEGTKTIANNLTSTIQVFTDSEYQLPYVLGSAHQGCLPPFPADVFMIPQYGYLTLNNGSQAVGRSSFYCLEYFPSQMLRTGNNFQFTYTFEDVPFHSSYAHSQSLDRLMNPLIDQYLYYLSRTQTTSNGRGVTLGFSQGGPNTMANQAKNWLPGPCYRQQRVSTYPLGDHSANFAWTAGTKYHLNGRNSLANPGIAMATHKDDEERFFPSNGILIFGKQNAARDNADYSDVMLTSEEEIKTTNPVATEEYGIVADNVMEPTRAPQIGTVNSQGALPGMVWQNRDVYLQGPIWAKIPHTDGNFHPSPLMGGFGLKHPPPQILIKNTPVPADPRSTFNGDKLNSFITQYSTGQVSVEIEWELQKENSKRWNPEIQYTSNYYKSTSVDFAVNTEGVYSEPRPIGTRYLTRNL

SEQ ID NO: 551 - protein, 737 aa, Artificial Sequence
  AAV capsid variant
MAADGYLPDWLEDNLSEGIREWWALKPGAPKPKANQQKQDDGRGLVLPGYKYLGPFNGLDKGEPVNAADAAALEHDKAYDQQLQAGDNPYLRYNHADAEFQERLQEDTSFGGNLGRAVFQAKKRVLEPLGLVEEGAKTAPGKKRPVEPSPQRSPDSSTGIGKKGQQPARKRLNFGQTGDSESVPDPQPLGEPPAAPSGVGPNTMAAGGGAPMADNNEGADGVGSSSGNWHCDSTWLGDRVITTSTRTWALPTYNNHLYKQISNGTSGGATNDNTYFGYSTPWGYFDFNRFHCHFSPRDWQRLINNNWGFRPKRLSFKLFNIQVKEVTQNEGTKTIANNLTSTIQVFTDSEYQLPYVLGSAHQGCLPPFPADVFMIPQYGYLTLNNGSQAVGRSSFYCLEYFPSQMLRTGNNFQFTYTFEDVPFHSSYAHSQSLDRLMNPLIDQYLYYLSRTQTTSNGRGVTLGFSQGGPNTMANQAKNWLPGPCYRQQRVSTYPLASGSGNFAWTAGTKYHLNGRNSLANPGIAMATHKDDEERFFPSNGILIFGKQNAARDNADYSDVMLTSEEEIKTTNPVATEEYGIVADNVMEPTRAPQIGTVNSQGALPGMVWQNRDVYLQGPIWAKIPHTDGNFHPSPLMGGFGLKHPPPQILIKNTPVPADPRSTFNGDKLNSFITQYSTGQVSVEIEWELQKENSKRWNPEIQYTSNYYKSTSVDFAVNTEGVYSEPRPIGTRYLTRNL

SEQ ID NO: 552 - protein, 737 aa, Artificial Sequence
  AAV capsid variant
MAADGYLPDWLEDNLSEGIREWWALKPGAPKPKANQQKQDDGRGLVLPGYKYLGPFNGLDKGEPVNAADAAALEHDKAYDQQLQAGDNPYLRYNHADAEFQERLQEDTSFGGNLGRAVFQAKKRVLEPLGLVEEGAKTAPGKKRPVEPSPQRSPDSSTGIGKKGQQPARKRLNFGQTGDSESVPDPQPLGEPPAAPSGVGPNTMAAGGGAPMADNNEGADGVGSSSGNWHCDSTWLGDRVITTSTRTWALPTYNNHLYKQISNGTSGGATNDNTYFGYSTPWGYFDFNRFHCHFSPRDWQRLINNNWGFRPKRLSFKLFNIQVKEVTQNEGTKTIANNLTSTIQVFTDSEYQLPYVLGSAHQGCLPPFPADVFMIPQYGYLTLNNGSQAVGRSSFYCLEYFPSQMLRTGNNFQFTYTFEDVPFHSSYAHSQSLDRLMNPLIDQYLYYLSRTQTTSNGRGVTLGFSQGGPNTMANQAKNWLPGPCYRQQRVSTYPLLGKEQNFAWTAGTKYHLNGRNSLANPGIAMATHKDDEERFFPSNGILIFGKQNAARDNADYSDVMLTSEEEIKTTNPVATEEYGIVADNVMEPTRAPQIGTVNSQGALPGMVWQNRDVYLQGPIWAKIPHTDGNFHPSPLMGGFGLKHPPPQILIKNTPVPADPRSTFNGDKLNSFITQYSTGQVSVEIEWELQKENSKRWNPEIQYTSNYYKSTSVDFAVNTEGVYSEPRPIGTRYLTRNL

SEQ ID NO: 553 - protein, 737 aa, Artificial Sequence
  AAV capsid variant
MAADGYLPDWLEDNLSEGIREWWALKPGAPKPKANQQKQDDGRGLVLPGYKYLGPFNGLDKGEPVNAADAAALEHDKAYDQQLQAGDNPYLRYNHADAEFQERLQEDTSFGGNLGRAVFQAKKRVLEPLGLVEEGAKTAPGKKRPVEPSPQRSPDSSTGIGKKGQQPARKRLNFGQTGDSESVPDPQPLGEPPAAPSGVGPNTMAAGGGAPMADNNEGADGVGSSSGNWHCDSTWLGDRVITTSTRTWALPTYNNHLYKQISNGTSGGATNDNTYFGYSTPWGYFDFNRFHCHFSPRDWQRLINNNWGFRPKRLSFKLFNIQVKEVTQNEGTKTIANNLTSTIQVFTDSEYQLPYVLGSAHQGCLPPFPADVFMIPQYGYLTLNNGSQAVGRSSFYCLEYFPSQMLRTGNNFQFTYTFEDVPFHSSYAHSQSLDRLMNPLIDQYLYYLSRTQTTSNGRGVTLGFSQGGPNTMANQAKNWLPGPCYRQQRVSTYPLSGTNQNFAWTAGTKYHLNGRNSLANPGIAMATHKDDEERFFPSNGILIFGKQNAARDNADYSDVMLTSEEEIKTTNPVATEEYGIVADNVMEPTRAPQIGTVNSQGALPGMVWQNRDVYLQGPIWAKIPHTDGNFHPSPLMGGFGLKHPPPQILIKNTPVPADPRSTFNGDKLNSFITQYSTGQVSVEIEWELQKENSKRWNPEIQYTSNYYKSTSVDFAVNTEGVYSEPRPIGTRYLTRNL

SEQ ID NO: 554 - protein, 737 aa, Artificial Sequence
  AAV capsid variant
MAADGYLPDWLEDNLSEGIREWWALKPGAPKPKANQQKQDDGRGLVLPGYKYLGPFNGLDKGEPVNAADAAALEHDKAYDQQLQAGDNPYLRYNHADAEFQERLQEDTSFGGNLGRAVFQAKKRVLEPLGLVEEGAKTAPGKKRPVEPSPQRSPDSSTGIGKKGQQPARKRLNFGQTGDSESVPDPQPLGEPPAAPSGVGPNTMAAGGGAPMADNNEGADGVGSSSGNWHCDSTWLGDRVITTSTRTWALPTYNNHLYKQISNGTSGGATNDNTYFGYSTPWGYFDFNRFHCHFSPRDWQRLINNNWGFRPKRLSFKLFNIQVKEVTQNEGTKTIANNLTSTIQVFTDSEYQLPYVLGSAHQGCLPPFPADVFMIPQYGYLTLNNGSQAVGRSSFYCLEYFPSQMLRTGNNFQFTYTFEDVPFHSSYAHSQSLDRLMNPLIDQYLYYLSRTQTTSNGRGVTLGFSQGGPNTMANQAKNWLPGPCYRQQRVSTYPLRDGQLNFAWTAGTKYHLNGRNSLANPGIAMATHKDDEERFFPSNGILIFGKQNAARDNADYSDVMLTSEEEIKTTNPVATEEYGIVADNVMEPTRAPQIGTVNSQGALPGMVWQNRDVYLQGPIWAKIPHTDGNFHPSPLMGGFGLKHPPPQILIKNTPVPADPRSTFNGDKLNSFITQYSTGQVSVEIEWELQKENSKRWNPEIQYTSNYYKSTSVDFAVNTEGVYSEPRPIGTRYLTRNL

SEQ ID NO: 555 - protein, 737 aa, Artificial Sequence
  AAV capsid variant
MAADGYLPDWLEDNLSEGIREWWALKPGAPKPKANQQKQDDGRGLVLPGYKYLGPFNGLDKGEPVNAADAAALEHDKAYDQQLQAGDNPYLRYNHADAEFQERLQEDTSFGGNLGRAVFQAKKRVLEPLGLVEEGAKTAPGKKRPVEPSPQRSPDSSTGIGKKGQQPARKRLNFGQTGDSESVPDPQPLGEPPAAPSGVGPNTMAAGGGAPMADNNEGADGVGSSSGNWHCDSTWLGDRVITTSTRTWALPTYNNHLYKQISNGTSGGATNDNTYFGYSTPWGYFDFNRFHCHFSPRDWQRLINNNWGFRPKRLSFKLFNIQVKEVTQNEGTKTIANNLTSTIQVFTDSEYQLPYVLGSAHQGCLPPFPADVFMIPQYGYLTLNNGSQAVGRSSFYCLEYFPSQMLRTGNNFQFTYTFEDVPFHSSYAHSQSLDRLMNPLIDQYLYYLSRTQTTSNGRGVTLGFSQGGPNTMANQAKNWLPGPCYRQQRVSTYPLADTGTNFAWTAGTKYHLNGRNSLANPGIAMATHKDDEERFFPSNGILIFGKQNAARDNADYSDVMLTSEEEIKTTNPVATEEYGIVADNVMEPTRAPQIGTVNSQGALPGMVWQNRDVYLQGPIWAKIPHTDGNFHPSPLMGGFGLKHPPPQILIKNTPVPADPRSTFNGDKLNSFITQYSTGQVSVEIEWELQKENSKRWNPEIQYTSNYYKSTSVDFAVNTEGVYSEPRPIGTRYLTRNL

SEQ ID NO: 556 - protein, 737 aa, Artificial Sequence; identical to SEQ ID NO: 434
  AAV capsid variant

SEQ ID NO: 557 - protein, 736 aa, Artificial Sequence; identical to SEQ ID NO: 435
  AAV capsid variant

SEQ ID NO: 558 - protein, 737 aa, Artificial Sequence
  AAV capsid variant
MAADGYLPDWLEDNLSEGIREWWALKPGAPQPKANQQHQDNARGLVLPGYKYLGPGNGLDKGEPVNAADAAALEHDKAYDQQLKAGDNPYLKYNHADAEFQERLKEDTSFGGNLGRAVFQAKKRLLEPLGLVEEAAKTAPGKKRPVEQSPQEPDSSAGIGKSGAQPAKKRLNFGQTGDSESVPDPQPLGEPPAAPSGVGPNTMAAGGGAPMADNNEGADGVGSSSGNWHCDSTWLGDRVITTSTRTWALPTYNNHLYKQISNGTSGGATNDNTYFGYSTPWGYFDFNRFHCHFSPRDWQRLINNNWGFRPKRLSFKLFNIQVKEVTQNEGTKTIANNLTSTIQVFTDSEYQLPYVLGSAHQGCLPPFPADVFMIPQYGYLTLNNGSQAVGRSSFYCLEYFPSQMLRTGNNFQFTYTFEDVPFHSSYAHSQSLDRLMNPLIDQYLYYLSRTQTTGGTANTQTLGFSQGGPNTMANQAKNWLPGPCYRQQRVSTYPLENFKYNFAWTAGTKYHLNGRNSLANPGIAMATHKDDEERFFPSNGILIFGKQNAARDNADYSDVMLTSEEEIKTTNPVATEEYGIVADNLQQQNTAPQIGTVNSQGALPGMVWQNRDVYLQGPIWAKIPHTDGNFHPSPLMGGFGLKHPPPQILIKNTPVPADPRSTFNGDKLNSFITQYSTGQVSVEIEWELQKENSKRWNPEIQYTSNYYKSTSVDFAVNTEGVYSEPRPIGTRYLTRNL

SEQ ID NO: 559 - protein, 737 aa, Artificial Sequence
  AAV capsid variant
MAADGYLPDWLEDNLSEGIREWWALKPGAPQPKANQQHQDNARGLVLPGYKYLGPGNGLDKGEPVNAADAAALEHDKAYDQQLKAGDNPYLKYNHADAEFQERLKEDTSFGGNLGRAVFQAKKRLLEPLGLVEEAAKTAPGKKRPVEQSPQEPDSSAGIGKSGAQPAKKRLNFGQTGDSESVPDPQPLGEPPAAPSGVGPNTMAAGGGAPMADNNEGADGVGSSSGNWHCDSTWLGDRVITTSTRTWALPTYNNHLYKQISNGTSGGATNDNTYFGYSTPWGYFDFNRFHCHFSPRDWQRLINNNWGFRPKRLSFKLFNIQVKEVTQNEGTKTIANNLTSTIQVFTDSEYQLPYVLGSAHQGCLPPFPADVFMIPQYGYLTLNNGSQAVGRSSFYCLEYFPSQMLRTGNNFQFTYTFEDVPFHSSYAHSQSLDRLMNPLIDQYLYYLSRTQTTGGTANTQTLGFSQGGPNTMANQAKNWLPGPCYRQQRVSTYPLGDHSANFAWTAGTKYHLNGRNSLANPGIAMATHKDDEERFFPSNGILIFGKQNAARDNADYSDVMLTSEEEIKTTNPVATEEYGIVADNLQQQNTAPQIGTVNSQGALPGMVWQNRDVYLQGPIWAKIPHTDGNFHPSPLMGGFGLKHPPPQILIKNTPVPADPRSTFNGDKLNSFITQYSTGQVSVEIEWELQKENSKRWNPEIQYTSNYYKSTSVDFAVNTEGVYSEPRPIGTRYLTRNL

SEQ ID NO: 560 - protein, 737 aa, Artificial Sequence
  AAV capsid variant
MAADGYLPDWLEDNLSEGIREWWALKPGAPQPKANQQHQDNARGLVLPGYKYLGPGNGLDKGEPVNAADAAALEHDKAYDQQLKAGDNPYLKYNHADAEFQERLKEDTSFGGNLGRAVFQAKKRLLEPLGLVEEAAKTAPGKKRPVEQSPQEPDSSAGIGKSGAQPAKKRLNFGQTGDSESVPDPQPLGEPPAAPSGVGPNTMAAGGGAPMADNNEGADGVGSSSGNWHCDSTWLGDRVITTSTRTWALPTYNNHLYKQISNGTSGGATNDNTYFGYSTPWGYFDFNRFHCHFSPRDWQRLINNNWGFRPKRLSFKLFNIQVKEVTQNEGTKTIANNLTSTIQVFTDSEYQLPYVLGSAHQGCLPPFPADVFMIPQYGYLTLNNGSQAVGRSSFYCLEYFPSQMLRTGNNFQFTYTFEDVPFHSSYAHSQSLDRLMNPLIDQYLYYLSRTQTTGGTANTQTLGFSQGGPNTMANQAKNWLPGPCYRQQRVSTYPLASGSGNFAWTAGTKYHLNGRNSLANPGIAMATHKDDEERFFPSNGILIFGKQNAARDNADYSDVMLTSEEEIKTTNPVATEEYGIVADNLQQQNTAPQIGTVNSQGALPGMVWQNRDVYLQGPIWAKIPHTDGNFHPSPLMGGFGLKHPPPQILIKNTPVPADPRSTFNGDKLNSFITQYSTGQVSVEIEWELQKENSKRWNPEIQYTSNYYKSTSVDFAVNTEGVYSEPRPIGTRYLTRNL

SEQ ID NO: 561 - protein, 737 aa, Artificial Sequence
  AAV capsid variant
MAADGYLPDWLEDNLSEGIREWWALKPGAPQPKANQQHQDNARGLVLPGYKYLGPGNGLDKGEPVNAADAAALEHDKAYDQQLKAGDNPYLKYNHADAEFQERLKEDTSFGGNLGRAVFQAKKRLLEPLGLVEEAAKTAPGKKRPVEQSPQEPDSSAGIGKSGAQPAKKRLNFGQTGDSESVPDPQPLGEPPAAPSGVGPNTMAAGGGAPMADNNEGADGVGSSSGNWHCDSTWLGDRVITTSTRTWALPTYNNHLYKQISNGTSGGATNDNTYFGYSTPWGYFDFNRFHCHFSPRDWQRLINNNWGFRPKRLSFKLFNIQVKEVTQNEGTKTIANNLTSTIQVFTDSEYQLPYVLGSAHQGCLPPFPADVFMIPQYGYLTLNNGSQAVGRSSFYCLEYFPSQMLRTGNNFQFTYTFEDVPFHSSYAHSQSLDRLMNPLIDQYLYYLSRTQTTGGTANTQTLGFSQGGPNTMANQAKNWLPGPCYRQQRVSTYPLLGKEQNFAWTAGTKYHLNGRNSLANPGIAMATHKDDEERFFPSNGILIFGKQNAARDNADYSDVMLTSEEEIKTTNPVATEEYGIVADNLQQQNTAPQIGTVNSQGALPGMVWQNRDVYLQGPIWAKIPHTDGNFHPSPLMGGFGLKHPPPQILIKNTPVPADPRSTFNGDKLNSFITQYSTGQVSVEIEWELQKENSKRWNPEIQYTSNYYKSTSVDFAVNTEGVYSEPRPIGTRYLTRNL

SEQ ID NO: 562 - protein, 737 aa, Artificial Sequence
  AAV capsid variant
MAADGYLPDWLEDNLSEGIREWWALKPGAPQPKANQQHQDNARGLVLPGYKYLGPGNGLDKGEPVNAADAAALEHDKAYDQQLKAGDNPYLKYNHADAEFQERLKEDTSFGGNLGRAVFQAKKRLLEPLGLVEEAAKTAPGKKRPVEQSPQEPDSSAGIGKSGAQPAKKRLNFGQTGDSESVPDPQPLGEPPAAPSGVGPNTMAAGGGAPMADNNEGADGVGSSSGNWHCDSTWLGDRVITTSTRTWALPTYNNHLYKQISNGTSGGATNDNTYFGYSTPWGYFDFNRFHCHFSPRDWQRLINNNWGFRPKRLSFKLFNIQVKEVTQNEGTKTIANNLTSTIQVFTDSEYQLPYVLGSAHQGCLPPFPADVFMIPQYGYLTLNNGSQAVGRSSFYCLEYFPSQMLRTGNNFQFTYTFEDVPFHSSYAHSQSLDRLMNPLIDQYLYYLSRTQTTGGTANTQTLGFSQGGPNTMANQAKNWLPGPCYRQQRVSTYPLSGTNQNFAWTAGTKYHLNGRNSLANPGIAMATHKDDEERFFPSNGILIFGKQNAARDNADYSDVMLTSEEEIKTTNPVATEEYGIVADNLQQQNTAPQIGTVNSQGALPGMVWQNRDVYLQGPIWAKIPHTDGNFHPSPLMGGFGLKHPPPQILIKNTPVPADPRSTFNGDKLNSFITQYSTGQVSVEIEWELQKENSKRWNPEIQYTSNYYKSTSVDFAVNTEGVYSEPRPIGTRYLTRNL

SEQ ID NO: 563 - protein, 737 aa, Artificial Sequence
  AAV capsid variant
MAADGYLPDWLEDNLSEGIREWWALKPGAPQPKANQQHQDNARGLVLPGYKYLGPGNGLDKGEPVNAADAAALEHDKAYDQQLKAGDNPYLKYNHADAEFQERLKEDTSFGGNLGRAVFQAKKRLLEPLGLVEEAAKTAPGKKRPVEQSPQEPDSSAGIGKSGAQPAKKRLNFGQTGDSESVPDPQPLGEPPAAPSGVGPNTMAAGGGAPMADNNEGADGVGSSSGNWHCDSTWLGDRVITTSTRTWALPTYNNHLYKQISNGTSGGATNDNTYFGYSTPWGYFDFNRFHCHFSPRDWQRLINNNWGFRPKRLSFKLFNIQVKEVTQNEGTKTIANNLTSTIQVFTDSEYQLPYVLGSAHQGCLPPFPADVFMIPQYGYLTLNNGSQAVGRSSFYCLEYFPSQMLRTGNNFQFTYTFEDVPFHSSYAHSQSLDRLMNPLIDQYLYYLSRTQTTGGTANTQTLGFSQGGPNTMANQAKNWLPGPCYRQQRVSTYPLRDGQLNFAWTAGTKYHLNGRNSLANPGIAMATHKDDEERFFPSNGILIFGKQNAARDNADYSDVMLTSEEEIKTTNPVATEEYGIVADNLQQQNTAPQIGTVNSQGALPGMVWQNRDVYLQGPIWAKIPHTDGNFHPSPLMGGFGLKHPPPQILIKNTPVPADPRSTFNGDKLNSFITQYSTGQVSVEIEWELQKENSKRWNPEIQYTSNYYKSTSVDFAVNTEGVYSEPRPIGTRYLTRNL

SEQ ID NO: 564 - protein, 737 aa, Artificial Sequence
  AAV capsid variant
MAADGYLPDWLEDNLSEGIREWWALKPGAPQPKANQQHQDNARGLVLPGYKYLGPGNGLDKGEPVNAADAAALEHDKAYDQQLKAGDNPYLKYNHADAEFQERLKEDTSFGGNLGRAVFQAKKRLLEPLGLVEEAAKTAPGKKRPVEQSPQEPDSSAGIGKSGAQPAKKRLNFGQTGDSESVPDPQPLGEPPAAPSGVGPNTMAAGGGAPMADNNEGADGVGSSSGNWHCDSTWLGDRVITTSTRTWALPTYNNHLYKQISNGTSGGATNDNTYFGYSTPWGYFDFNRFHCHFSPRDWQRLINNNWGFRPKRLSFKLFNIQVKEVTQNEGTKTIANNLTSTIQVFTDSEYQLPYVLGSAHQGCLPPFPADVFMIPQYGYLTLNNGSQAVGRSSFYCLEYFPSQMLRTGNNFQFTYTFEDVPFHSSYAHSQSLDRLMNPLIDQYLYYLSRTQTTGGTANTQTLGFSQGGPNTMANQAKNWLPGPCYRQQRVSTYPLADTGTNFAWTAGTKYHLNGRNSLANPGIAMATHKDDEERFFPSNGILIFGKQNAARDNADYSDVMLTSEEEIKTTNPVATEEYGIVADNLQQQNTAPQIGTVNSQGALPGMVWQNRDVYLQGPIWAKIPHTDGNFHPSPLMGGFGLKHPPPQILIKNTPVPADPRSTFNGDKLNSFITQYSTGQVSVEIEWELQKENSKRWNPEIQYTSNYYKSTSVDFAVNTEGVYSEPRPIGTRYLTRNL

SEQ ID NO: 565 - protein, 737 aa, Artificial Sequence; identical to SEQ ID NO: 436
  AAV capsid variant

SEQ ID NO: 566 - protein, 736 aa, Artificial Sequence; identical to SEQ ID NO: 437
  AAV capsid variant

SEQ ID NO: 567 - protein, 736 aa, Artificial Sequence
  AAV capsid variant
MAADGYLPDWLEDNLSEGIREWWALKPGAPQPKANQQHQDNARGLVLPGYKYLGPGNGLDKGEPVNAADAAALEHDKAYDQQLKAGDNPYLKYNHADAEFQERLKEDTSFGGNLGRAVFQAKKRLLEPLGLVEEAAKTAPGKKRPVEQSPQEPDSSAGIGKSGAQPAKKRLNFGQTGDSESVPDPQPLGEPPAAPSGVGPNTMAAGGGAPMADNNEGADGVGSSSGNWHCDSTWLGDRVITTSTRTWALPTYNNHLYKQISNGTSGGATNDNTYFGYSTPWGYFDFNRFHCHFSPRDWQRLINNNWGFRPKRLSFKLFNIQVKEVTQNEGTKTIANNLTSTIQVFTDSEYQLPYVLGSAHQGCLPPFPADVFMIPQYGYLTLNNGSQAVGRSSFYCLEYFPSQMLRTGNNFQFTYTFEDVPFHSSYAHSQSLDRLMNPLIDQYLYYLSRTQTTSNGRGVTLGFSQGGPNTMANQAKNWLPGPCYRQQRVSTYPLENFKYNFAWTAGTKYHLNGRNSLANPGIAMATHKDDEERFFPSNGILIFGKQNAARDNADYSDVMLTSEEEIKTTNPVATEEYGIVADNLQQQNTAPQIGTVNSQGALPGMVWQNRDVYLQGPIWAKIPHTDGNFHPSPLMGGFGLKHPPPQILIKNTPVPADPRSTFNGDKLNSFITQYSTGQVSVEIEWELQKENSKRWNPEIQYTSNYYKSTSVDFAVNTEGVYSEPRPIGTRYLTRNL

SEQ ID NO: 568 - protein, 736 aa, Artificial Sequence
  AAV capsid variant
MAADGYLPDWLEDNLSEGIREWWALKPGAPQPKANQQHQDNARGLVLPGYKYLGPGNGLDKGEPVNAADAAALEHDKAYDQQLKAGDNPYLKYNHADAEFQERLKEDTSFGGNLGRAVFQAKKRLLEPLGLVEEAAKTAPGKKRPVEQSPQEPDSSAGIGKSGAQPAKKRLNFGQTGDSESVPDPQPLGEPPAAPSGVGPNTMAAGGGAPMADNNEGADGVGSSSGNWHCDSTWLGDRVITTSTRTWALPTYNNHLYKQISNGTSGGATNDNTYFGYSTPWGYFDFNRFHCHFSPRDWQRLINNNWGFRPKRLSFKLFNIQVKEVTQNEGTKTIANNLTSTIQVFTDSEYQLPYVLGSAHQGCLPPFPADVFMIPQYGYLTLNNGSQAVGRSSFYCLEYFPSQMLRTGNNFQFTYTFEDVPFHSSYAHSQSLDRLMNPLIDQYLYYLSRTQTTSNGRGVTLGFSQGGPNTMANQAKNWLPGPCYRQQRVSTYPLGDHSANFAWTAGTKYHLNGRNSLANPGIAMATHKDDEERFFPSNGILIFGKQNAARDNADYSDVMLTSEEEIKTTNPVATEEYGIVADNLQQQNTAPQIGTVNSQGALPGMVWQNRDVYLQGPIWAKIPHTDGNFHPSPLMGGFGLKHPPPQILIKNTPVPADPRSTFNGDKLNSFITQYSTGQVSVEIEWELQKENSKRWNPEIQYTSNYYKSTSVDFAVNTEGVYSEPRPIGTRYLTRNL

SEQ ID NO: 569 - protein, 736 aa, Artificial Sequence
  AAV capsid variant
MAADGYLPDWLEDNLSEGIREWWALKPGAPQPKANQQHQDNARGLVLPGYKYLGPGNGLDKGEPVNAADAAALEHDKAYDQQLKAGDNPYLKYNHADAEFQERLKEDTSFGGNLGRAVFQAKKRLLEPLGLVEEAAKTAPGKKRPVEQSPQEPDSSAGIGKSGAQPAKKRLNFGQTGDSESVPDPQPLGEPPAAPSGVGPNTMAAGGGAPMADNNEGADGVGSSSGNWHCDSTWLGDRVITTSTRTWALPTYNNHLYKQISNGTSGGATNDNTYFGYSTPWGYFDFNRFHCHFSPRDWQRLINNNWGFRPKRLSFKLFNIQVKEVTQNEGTKTIANNLTSTIQVFTDSEYQLPYVLGSAHQGCLPPFPADVFMIPQYGYLTLNNGSQAVGRSSFYCLEYFPSQMLRTGNNFQFTYTFEDVPFHSSYAHSQSLDRLMNPLIDQYLYYLSRTQTTSNGRGVTLGFSQGGPNTMANQAKNWLPGPCYRQQRVSTYPLASGSGNFAWTAGTKYHLNGRNSLANPGIAMATHKDDEERFFPSNGILIFGKQNAARDNADYSDVMLTSEEEIKTTNPVATEEYGIVADNLQQQNTAPQIGTVNSQGALPGMVWQNRDVYLQGPIWAKIPHTDGNFHPSPLMGGFGLKHPPPQILIKNTPVPADPRSTFNGDKLNSFITQYSTGQVSVEIEWELQKENSKRWNPEIQYTSNYYKSTSVDFAVNTEGVYSEPRPIGTRYLTRNL

SEQ ID NO: 570 - protein, 736 aa, Artificial Sequence
  AAV capsid variant
MAADGYLPDWLEDNLSEGIREWWALKPGAPQPKANQQHQDNARGLVLPGYKYLGPGNGLDKGEPVNAADAAALEHDKAYDQQLKAGDNPYLKYNHADAEFQERLKEDTSFGGNLGRAVFQAKKRLLEPLGLVEEAAKTAPGKKRPVEQSPQEPDSSAGIGKSGAQPAKKRLNFGQTGDSESVPDPQPLGEPPAAPSGVGPNTMAAGGGAPMADNNEGADGVGSSSGNWHCDSTWLGDRVITTSTRTWALPTYNNHLYKQISNGTSGGATNDNTYFGYSTPWGYFDFNRFHCHFSPRDWQRLINNNWGFRPKRLSFKLFNIQVKEVTQNEGTKTIANNLTSTIQVFTDSEYQLPYVLGSAHQGCLPPFPADVFMIPQYGYLTLNNGSQAVGRSSFYCLEYFPSQMLRTGNNFQFTYTFEDVPFHSSYAHSQSLDRLMNPLIDQYLYYLSRTQTTSNGRGVTLGFSQGGPNTMANQAKNWLPGPCYRQQRVSTYPLLGKEQNFAWTAGTKYHLNGRNSLANPGIAMATHKDDEERFFPSNGILIFGKQNAARDNADYSDVMLTSEEEIKTTNPVATEEYGIVADNLQQQNTAPQIGTVNSQGALPGMVWQNRDVYLQGPIWAKIPHTDGNFHPSPLMGGFGLKHPPPQILIKNTPVPADPRSTFNGDKLNSFITQYSTGQVSVEIEWELQKENSKRWNPEIQYTSNYYKSTSVDFAVNTEGVYSEPRPIGTRYLTRNL

SEQ ID NO: 571 - protein, 736 aa, Artificial Sequence
  AAV capsid variant
MAADGYLPDWLEDNLSEGIREWWALKPGAPQPKANQQHQDNARGLVLPGYKYLGPGNGLDKGEPVNAADAAALEHDKAYDQQLKAGDNPYLKYNHADAEFQERLKEDTSFGGNLGRAVFQAKKRLLEPLGLVEEAAKTAPGKKRPVEQSPQEPDSSAGIGKSGAQPAKKRLNFGQTGDSESVPDPQPLGEPPAAPSGVGPNTMAAGGGAPMADNNEGADGVGSSSGNWHCDSTWLGDRVITTSTRTWALPTYNNHLYKQISNGTSGGATNDNTYFGYSTPWGYFDFNRFHCHFSPRDWQRLINNNWGFRPKRLSFKLFNIQVKEVTQNEGTKTIANNLTSTIQVFTDSEYQLPYVLGSAHQGCLPPFPADVFMIPQYGYLTLNNGSQAVGRSSFYCLEYFPSQMLRTGNNFQFTYTFEDVPFHSSYAHSQSLDRLMNPLIDQYLYYLSRTQTTSNGRGVTLGFSQGGPNTMANQAKNWLPGPCYRQQRVSTYPLSGTNQNFAWTAGTKYHLNGRNSLANPGIAMATHKDDEERFFPSNGILIFGKQNAARDNADYSDVMLTSEEEIKTTNPVATEEYGIVADNLQQQNTAPQIGTVNSQGALPGMVWQNRDVYLQGPIWAKIPHTDGNFHPSPLMGGFGLKHPPPQILIKNTPVPADPRSTFNGDKLNSFITQYSTGQVSVEIEWELQKENSKRWNPEIQYTSNYYKSTSVDFAVNTEGVYSEPRPIGTRYLTRNL

SEQ ID NO: 572 - protein, 736 aa, Artificial Sequence
  AAV capsid variant
MAADGYLPDWLEDNLSEGIREWWALKPGAPQPKANQQHQDNARGLVLPGYKYLGPGNGLDKGEPVNAADAAALEHDKAYDQQLKAGDNPYLKYNHADAEFQERLKEDTSFGGNLGRAVFQAKKRLLEPLGLVEEAAKTAPGKKRPVEQSPQEPDSSAGIGKSGAQPAKKRLNFGQTGDSESVPDPQPLGEPPAAPSGVGPNTMAAGGGAPMADNNEGADGVGSSSGNWHCDSTWLGDRVITTSTRTWALPTYNNHLYKQISNGTSGGATNDNTYFGYSTPWGYFDFNRFHCHFSPRDWQRLINNNWGFRPKRLSFKLFNIQVKEVTQNEGTKTIANNLTSTIQVFTDSEYQLPYVLGSAHQGCLPPFPADVFMIPQYGYLTLNNGSQAVGRSSFYCLEYFPSQMLRTGNNFQFTYTFEDVPFHSSYAHSQSLDRLMNPLIDQYLYYLSRTQTTSNGRGVTLGFSQGGPNTMANQAKNWLPGPCYRQQRVSTYPLRDGQLNFAWTAGTKYHLNGRNSLANPGIAMATHKDDEERFFPSNGILIFGKQNAARDNADYSDVMLTSEEEIKTTNPVATEEYGIVADNLQQQNTAPQIGTVNSQGALPGMVWQNRDVYLQGPIWAKIPHTDGNFHPSPLMGGFGLKHPPPQILIKNTPVPADPRSTFNGDKLNSFITQYSTGQVSVEIEWELQKENSKRWNPEIQYTSNYYKSTSVDFAVNTEGVYSEPRPIGTRYLTRNL

SEQ ID NO: 573 - protein, 736 aa, Artificial Sequence
  AAV capsid variant
MAADGYLPDWLEDNLSEGIREWWALKPGAPQPKANQQHQDNARGLVLPGYKYLGPGNGLDKGEPVNAADAAALEHDKAYDQQLKAGDNPYLKYNHADAEFQERLKEDTSFGGNLGRAVFQAKKRLLEPLGLVEEAAKTAPGKKRPVEQSPQEPDSSAGIGKSGAQPAKKRLNFGQTGDSESVPDPQPLGEPPAAPSGVGPNTMAAGGGAPMADNNEGADGVGSSSGNWHCDSTWLGDRVITTSTRTWALPTYNNHLYKQISNGTSGGATNDNTYFGYSTPWGYFDFNRFHCHFSPRDWQRLINNNWGFRPKRLSFKLFNIQVKEVTQNEGTKTIANNLTSTIQVFTDSEYQLPYVLGSAHQGCLPPFPADVFMIPQYGYLTLNNGSQAVGRSSFYCLEYFPSQMLRTGNNFQFTYTFEDVPFHSSYAHSQSLDRLMNPLIDQYLYYLSRTQTTSNGRGVTLGFSQGGPNTMANQAKNWLPGPCYRQQRVSTYPLADTGTNFAWTAGTKYHLNGRNSLANPGIAMATHKDDEERFFPSNGILIFGKQNAARDNADYSDVMLTSEEEIKTTNPVATEEYGIVADNLQQQNTAPQIGTVNSQGALPGMVWQNRDVYLQGPIWAKIPHTDGNFHPSPLMGGFGLKHPPPQILIKNTPVPADPRSTFNGDKLNSFITQYSTGQVSVEIEWELQKENSKRWNPEIQYTSNYYKSTSVDFAVNTEGVYSEPRPIGTRYLTRNL

SEQ ID NO: 574 - protein, 737 aa, Artificial Sequence
  AAV capsid variant
MAADGYLPDWLEDNLSEGIREWWALKPGAPQPKANQQHQDNARGLVLPGYKYLGPGNGLDKGEPVNAADAAALEHDKAYDQQLKAGDNPYLKYNHADAEFQERLKEDTSFGGNLGRAVFQAKKRLLEPLGLVEEAAKTAPGKKRPVEQSPQEPDSSAGIGKSGAQPAKKRLNFGQTGDSESVPDPQPLGEPPAAPSGVGPNTMAAGGGAPMADNNEGADGVGSSSGNWHCDSTWLGDRVITTSTRTWALPTYNNHLYKQISNGTSGGATNDNTYFGYSTPWGYFDFNRFHCHFSPRDWQRLINNNWGFRPKRLSFKLFNIQVKEVTQNEGTKTIANNLTSTIQVFTDSEYQLPYVLGSAHQGCLPPFPADVFMIPQYGYLTLNNGSQAVGRSSFYCLEYFPSQMLRTGNNFQFTYTFEDVPFHSSYAHSQSLDRLMNPLIDQYLYYLSRTQTTGGTANTQTLGFSQGGPNTMANQAKNWLPGPCYRQQRVSTYPLENFKYNFAWTAGTKYHLNGRNSLANPGIAMATHKDDEERFFPSNGILIFGKQNAARDNADYSDVMLTSEEEIKTTNPVATEEYGIVADNVMEPTRAPQIGTVNSQGALPGMVWQNRDVYLQGPIWAKIPHTDGNFHPSPLMGGFGLKHPPPQILIKNTPVPADPRSTFNGDKLNSFITQYSTGQVSVEIEWELQKENSKRWNPEIQYTSNYYKSTSVDFAVNTEGVYSEPRPIGTRYLTRNL

SEQ ID NO: 575 - protein, 737 aa, Artificial Sequence
  AAV capsid variant
MAADGYLPDWLEDNLSEGIREWWALKPGAPQPKANQQHQDNARGLVLPGYKYLGPGNGLDKGEPVNAADAAALEHDKAYDQQLKAGDNPYLKYNHADAEFQERLKEDTSFGGNLGRAVFQAKKRLLEPLGLVEEAAKTAPGKKRPVEQSPQEPDSSAGIGKSGAQPAKKRLNFGQTGDSESVPDPQPLGEPPAAPSGVGPNTMAAGGGAPMADNNEGADGVGSSSGNWHCDSTWLGDRVITTSTRTWALPTYNNHLYKQISNGTSGGATNDNTYFGYSTPWGYFDFNRFHCHFSPRDWQRLINNNWGFRPKRLSFKLFNIQVKEVTQNEGTKTIANNLTSTIQVFTDSEYQLPYVLGSAHQGCLPPFPADVFMIPQYGYLTLNNGSQAVGRSSFYCLEYFPSQMLRTGNNFQFTYTFEDVPFHSSYAHSQSLDRLMNPLIDQYLYYLSRTQTTGGTANTQTLGFSQGGPNTMANQAKNWLPGPCYRQQRVSTYPLGDHSANFAWTAGTKYHLNGRNSLANPGIAMATHKDDEERFFPSNGILIFGKQNAARDNADYSDVMLTSEEEIKTTNPVATEEYGIVADNVMEPTRAPQIGTVNSQGALPGMVWQNRDVYLQGPIWAKIPHTDGNFHPSPLMGGFGLKHPPPQILIKNTPVPADPRSTFNGDKLNSFITQYSTGQVSVEIEWELQKENSKRWNPEIQYTSNYYKSTSVDFAVNTEGVYSEPRPIGTRYLTRNL

SEQ ID NO: 576 - protein, 737 aa, Artificial Sequence
  AAV capsid variant
MAADGYLPDWLEDNLSEGIREWWALKPGAPQPKANQQHQDNARGLVLPGYKYLGPGNGLDKGEPVNAADAAALEHDKAYDQQLKAGDNPYLKYNHADAEFQERLKEDTSFGGNLGRAVFQAKKRLLEPLGLVEEAAKTAPGKKRPVEQSPQEPDSSAGIGKSGAQPAKKRLNFGQTGDSESVPDPQPLGEPPAAPSGVGPNTMAAGGGAPMADNNEGADGVGSSSGNWHCDSTWLGDRVITTSTRTWALPTYNNHLYKQISNGTSGGATNDNTYFGYSTPWGYFDFNRFHCHFSPRDWQRLINNNWGFRPKRLSFKLFNIQVKEVTQNEGTKTIANNLTSTIQVFTDSEYQLPYVLGSAHQGCLPPFPADVFMIPQYGYLTLNNGSQAVGRSSFYCLEYFPSQMLRTGNNFQFTYTFEDVPFHSSYAHSQSLDRLMNPLIDQYLYYLSRTQTTGGTANTQTLGFSQGGPNTMANQAKNWLPGPCYRQQRVSTYPLASGSGNFAWTAGTKYHLNGRNSLANPGIAMATHKDDEERFFPSNGILIFGKQNAARDNADYSDVMLTSEEEIKTTNPVATEEYGIVADNVMEPTRAPQIGTVNSQGALPGMVWQNRDVYLQGPIWAKIPHTDGNFHPSPLMGGFGLKHPPPQILIKNTPVPADPRSTFNGDKLNSFITQYSTGQVSVEIEWELQKENSKRWNPEIQYTSNYYKSTSVDFAVNTEGVYSEPRPIGTRYLTRNL

SEQ ID NO: 577 - protein, 737 aa, Artificial Sequence
  AAV capsid variant
MAADGYLPDWLEDNLSEGIREWWALKPGAPQPKANQQHQDNARGLVLPGYKYLGPGNGLDKGEPVNAADAAALEHDKAYDQQLKAGDNPYLKYNHADAEFQERLKEDTSFGGNLGRAVFQAKKRLLEPLGLVEEAAKTAPGKKRPVEQSPQEPDSSAGIGKSGAQPAKKRLNFGQTGDSESVPDPQPLGEPPAAPSGVGPNTMAAGGGAPMADNNEGADGVGSSSGNWHCDSTWLGDRVITTSTRTWALPTYNNHLYKQISNGTSGGATNDNTYFGYSTPWGYFDFNRFHCHFSPRDWQRLINNNWGFRPKRLSFKLFNIQVKEVTQNEGTKTIANNLTSTIQVFTDSEYQLPYVLGSAHQGCLPPFPADVFMIPQYGYLTLNNGSQAVGRSSFYCLEYFPSQMLRTGNNFQFTYTFEDVPFHSSYAHSQSLDRLMNPLIDQYLYYLSRTQTTGGTANTQTLGFSQGGPNTMANQAKNWLPGPCYRQQRVSTYPLLGKEQNFAWTAGTKYHLNGRNSLANPGIAMATHKDDEERFFPSNGILIFGKQNAARDNADYSDVMLTSEEEIKTTNPVATEEYGIVADNVMEPTRAPQIGTVNSQGALPGMVWQNRDVYLQGPIWAKIPHTDGNFHPSPLMGGFGLKHPPPQILIKNTPVPADPRSTFNGDKLNSFITQYSTGQVSVEIEWELQKENSKRWNPEIQYTSNYYKSTSVDFAVNTEGVYSEPRPIGTRYLTRNL

SEQ ID NO: 578 - protein, 737 aa, Artificial Sequence
  AAV capsid variant
MAADGYLPDWLEDNLSEGIREWWALKPGAPQPKANQQHQDNARGLVLPGYKYLGPGNGLDKGEPVNAADAAALEHDKAYDQQLKAGDNPYLKYNHADAEFQERLKEDTSFGGNLGRAVFQAKKRLLEPLGLVEEAAKTAPGKKRPVEQSPQEPDSSAGIGKSGAQPAKKRLNFGQTGDSESVPDPQPLGEPPAAPSGVGPNTMAAGGGAPMADNNEGADGVGSSSGNWHCDSTWLGDRVITTSTRTWALPTYNNHLYKQISNGTSGGATNDNTYFGYSTPWGYFDFNRFHCHFSPRDWQRLINNNWGFRPKRLSFKLFNIQVKEVTQNEGTKTIANNLTSTIQVFTDSEYQLPYVLGSAHQGCLPPFPADVFMIPQYGYLTLNNGSQAVGRSSFYCLEYFPSQMLRTGNNFQFTYTFEDVPFHSSYAHSQSLDRLMNPLIDQYLYYLSRTQTTGGTANTQTLGFSQGGPNTMANQAKNWLPGPCYRQQRVSTYPLSGTNQNFAWTAGTKYHLNGRNSLANPGIAMATHKDDEERFFPSNGILIFGKQNAARDNADYSDVMLTSEEEIKTTNPVATEEYGIVADNVMEPTRAPQIGTVNSQGALPGMVWQNRDVYLQGPIWAKIPHTDGNFHPSPLMGGFGLKHPPPQILIKNTPVPADPRSTFNGDKLNSFITQYSTGQVSVEIEWELQKENSKRWNPEIQYTSNYYKSTSVDFAVNTEGVYSEPRPIGTRYLTRNL

SEQ ID NO: 579 - protein, 737 aa, Artificial Sequence
  AAV capsid variant
MAADGYLPDWLEDNLSEGIREWWALKPGAPQPKANQQHQDNARGLVLPGYKYLGPGNGLDKGEPVNAADAAALEHDKAYDQQLKAGDNPYLKYNHADAEFQERLKEDTSFGGNLGRAVFQAKKRLLEPLGLVEEAAKTAPGKKRPVEQSPQEPDSSAGIGKSGAQPAKKRLNFGQTGDSESVPDPQPLGEPPAAPSGVGPNTMAAGGGAPMADNNEGADGVGSSSGNWHCDSTWLGDRVITTSTRTWALPTYNNHLYKQISNGTSGGATNDNTYFGYSTPWGYFDFNRFHCHFSPRDWQRLINNNWGFRPKRLSFKLFNIQVKEVTQNEGTKTIANNLTSTIQVFTDSEYQLPYVLGSAHQGCLPPFPADVFMIPQYGYLTLNNGSQAVGRSSFYCLEYFPSQMLRTGNNFQFTYTFEDVPFHSSYAHSQSLDRLMNPLIDQYLYYLSRTQTTGGTANTQTLGFSQGGPNTMANQAKNWLPGPCYRQQRVSTYPLRDGQLNFAWTAGTKYHLNGRNSLANPGIAMATHKDDEERFFPSNGILIFGKQNAARDNADYSDVMLTSEEEIKTTNPVATEEYGIVADNVMEPTRAPQIGTVNSQGALPGMVWQNRDVYLQGPIWAKIPHTDGNFHPSPLMGGFGLKHPPPQILIKNTPVPADPRSTFNGDKLNSFITQYSTGQVSVEIEWELQKENSKRWNPEIQYTSNYYKSTSVDFAVNTEGVYSEPRPIGTRYLTRNL

SEQ ID NO: 580 - protein, 737 aa, Artificial Sequence
  AAV capsid variant
MAADGYLPDWLEDNLSEGIREWWALKPGAPQPKANQQHQDNARGLVLPGYKYLGPGNGLDKGEPVNAADAAALEHDKAYDQQLKAGDNPYLKYNHADAEFQERLKEDTSFGGNLGRAVFQAKKRLLEPLGLVEEAAKTAPGKKRPVEQSPQEPDSSAGIGKSGAQPAKKRLNFGQTGDSESVPDPQPLGEPPAAPSGVGPNTMAAGGGAPMADNNEGADGVGSSSGNWHCDSTWLGDRVITTSTRTWALPTYNNHLYKQISNGTSGGATNDNTYFGYSTPWGYFDFNRFHCHFSPRDWQRLINNNWGFRPKRLSFKLFNIQVKEVTQNEGTKTIANNLTSTIQVFTDSEYQLPYVLGSAHQGCLPPFPADVFMIPQYGYLTLNNGSQAVGRSSFYCLEYFPSQMLRTGNNFQFTYTFEDVPFHSSYAHSQSLDRLMNPLIDQYLYYLSRTQTTGGTANTQTLGFSQGGPNTMANQAKNWLPGPCYRQQRVSTYPLADTGTNFAWTAGTKYHLNGRNSLANPGIAMATHKDDEERFFPSNGILIFGKQNAARDNADYSDVMLTSEEEIKTTNPVATEEYGIVADNVMEPTRAPQIGTVNSQGALPGMVWQNRDVYLQGPIWAKIPHTDGNFHPSPLMGGFGLKHPPPQILIKNTPVPADPRSTFNGDKLNSFITQYSTGQVSVEIEWELQKENSKRWNPEIQYTSNYYKSTSVDFAVNTEGVYSEPRPIGTRYLTRNL

SEQ ID NO: 581 - protein, 736 aa, Artificial Sequence
  AAV capsid variant
MAADGYLPDWLEDNLSEGIREWWALKPGAPQPKANQQHQDNARGLVLPGYKYLGPGNGLDKGEPVNAADAAALEHDKAYDQQLKAGDNPYLKYNHADAEFQERLKEDTSFGGNLGRAVFQAKKRLLEPLGLVEEAAKTAPGKKRPVEQSPQEPDSSAGIGKSGAQPAKKRLNFGQTGDSESVPDPQPLGEPPAAPSGVGPNTMAAGGGAPMADNNEGADGVGSSSGNWHCDSTWLGDRVITTSTRTWALPTYNNHLYKQISNGTSGGATNDNTYFGYSTPWGYFDFNRFHCHFSPRDWQRLINNNWGFRPKRLSFKLFNIQVKEVTQNEGTKTIANNLTSTIQVFTDSEYQLPYVLGSAHQGCLPPFPADVFMIPQYGYLTLNNGSQAVGRSSFYCLEYFPSQMLRTGNNFQFTYTFEDVPFHSSYAHSQSLDRLMNPLIDQYLYYLSRTQTTSNGRGVTLGFSQGGPNTMANQAKNWLPGPCYRQQRVSTYPLENFKYNFAWTAGTKYHLNGRNSLANPGIAMATHKDDEERFFPSNGILIFGKQNAARDNADYSDVMLTSEEEIKTTNPVATEEYGIVADNVMEPTRAPQIGTVNSQGALPGMVWQNRDVYLQGPIWAKIPHTDGNFHPSPLMGGFGLKHPPPQILIKNTPVPADPRSTFNGDKLNSFITQYSTGQVSVEIEWELQKENSKRWNPEIQYTSNYYKSTSVDFAVNTEGVYSEPRPIGTRYLTRNL

SEQ ID NO: 582 - protein, 736 aa, Artificial Sequence
  AAV capsid variant
MAADGYLPDWLEDNLSEGIREWWALKPGAPQPKANQQHQDNARGLVLPGYKYLGPGNGLDKGEPVNAADAAALEHDKAYDQQLKAGDNPYLKYNHADAEFQERLKEDTSFGGNLGRAVFQAKKRLLEPLGLVEEAAKTAPGKKRPVEQSPQEPDSSAGIGKSGAQPAKKRLNFGQTGDSESVPDPQPLGEPPAAPSGVGPNTMAAGGGAPMADNNEGADGVGSSSGNWHCDSTWLGDRVITTSTRTWALPTYNNHLYKQISNGTSGGATNDNTYFGYSTPWGYFDFNRFHCHFSPRDWQRLINNNWGFRPKRLSFKLFNIQVKEVTQNEGTKTIANNLTSTIQVFTDSEYQLPYVLGSAHQGCLPPFPADVFMIPQYGYLTLNNGSQAVGRSSFYCLEYFPSQMLRTGNNFQFTYTFEDVPFHSSYAHSQSLDRLMNPLIDQYLYYLSRTQTTSNGRGVTLGFSQGGPNTMANQAKNWLPGPCYRQQRVSTYPLGDHSANFAWTAGTKYHLNGRNSLANPGIAMATHKDDEERFFPSNGILIFGKQNAARDNADYSDVMLTSEEEIKTTNPVATEEYGIVADNVMEPTRAPQIGTVNSQGALPGMVWQNRDVYLQGPIWAKIPHTDGNFHPSPLMGGFGLKHPPPQILIKNTPVPADPRSTFNGDKLNSFITQYSTGQVSVEIEWELQKENSKRWNPEIQYTSNYYKSTSVDFAVNTEGVYSEPRPIGTRYLTRNL

SEQ ID NO: 583 - protein, 736 aa, Artificial Sequence
  AAV capsid variant
MAADGYLPDWLEDNLSEGIREWWALKPGAPQPKANQQHQDNARGLVLPGYKYLGPGNGLDKGEPVNAADAAALEHDKAYDQQLKAGDNPYLKYNHADAEFQERLKEDTSFGGNLGRAVFQAKKRLLEPLGLVEEAAKTAPGKKRPVEQSPQEPDSSAGIGKSGAQPAKKRLNFGQTGDSESVPDPQPLGEPPAAPSGVGPNTMAAGGGAPMADNNEGADGVGSSSGNWHCDSTWLGDRVITTSTRTWALPTYNNHLYKQISNGTSGGATNDNTYFGYSTPWGYFDFNRFHCHFSPRDWQRLINNNWGFRPKRLSFKLFNIQVKEVTQNEGTKTIANNLTSTIQVFTDSEYQLPYVLGSAHQGCLPPFPADVFMIPQYGYLTLNNGSQAVGRSSFYCLEYFPSQMLRTGNNFQFTYTFEDVPFHSSYAHSQSLDRLMNPLIDQYLYYLSRTQTTSNGRGVTLGFSQGGPNTMANQAKNWLPGPCYRQQRVSTYPLASGSGNFAWTAGTKYHLNGRNSLANPGIAMATHKDDEERFFPSNGILIFGKQNAARDNADYSDVMLTSEEEIKTTNPVATEEYGIVADNVMEPTRAPQIGTVNSQGALPGMVWQNRDVYLQGPIWAKIPHTDGNFHPSPLMGGFGLKHPPPQILIKNTPVPADPRSTFNGDKLNSFITQYSTGQVSVEIEWELQKENSKRWNPEIQYTSNYYKSTSVDFAVNTEGVYSEPRPIGTRYLTRNL

SEQ ID NO: 584 - protein, 736 aa, Artificial Sequence
  AAV capsid variant
MAADGYLPDWLEDNLSEGIREWWALKPGAPQPKANQQHQDNARGLVLPGYKYLGPGNGLDKGEPVNAADAAALEHDKAYDQQLKAGDNPYLKYNHADAEFQERLKEDTSFGGNLGRAVFQAKKRLLEPLGLVEEAAKTAPGKKRPVEQSPQEPDSSAGIGKSGAQPAKKRLNFGQTGDSESVPDPQPLGEPPAAPSGVGPNTMAAGGGAPMADNNEGADGVGSSSGNWHCDSTWLGDRVITTSTRTWALPTYNNHLYKQISNGTSGGATNDNTYFGYSTPWGYFDFNRFHCHFSPRDWQRLINNNWGFRPKRLSFKLFNIQVKEVTQNEGTKTIANNLTSTIQVFTDSEYQLPYVLGSAHQGCLPPFPADVFMIPQYGYLTLNNGSQAVGRSSFYCLEYFPSQMLRTGNNFQFTYTFEDVPFHSSYAHSQSLDRLMNPLIDQYLYYLSRTQTTSNGRGVTLGFSQGGPNTMANQAKNWLPGPCYRQQRVSTYPLLGKEQNFAWTAGTKYHLNGRNSLANPGIAMATHKDDEERFFPSNGILIFGKQNAARDNADYSDVMLTSEEEIKTTNPVATEEYGIVADNVMEPTRAPQIGTVNSQGALPGMVWQNRDVYLQGPIWAKIPHTDGNFHPSPLMGGFGLKHPPPQILIKNTPVPADPRSTFNGDKLNSFITQYSTGQVSVEIEWELQKENSKRWNPEIQYTSNYYKSTSVDFAVNTEGVYSEPRPIGTRYLTRNL

SEQ ID NO: 585 - protein, 736 aa, Artificial Sequence
  AAV capsid variant
MAADGYLPDWLEDNLSEGIREWWALKPGAPQPKANQQHQDNARGLVLPGYKYLGPGNGLDKGEPVNAADAAALEHDKAYDQQLKAGDNPYLKYNHADAEFQERLKEDTSFGGNLGRAVFQAKKRLLEPLGLVEEAAKTAPGKKRPVEQSPQEPDSSAGIGKSGAQPAKKRLNFGQTGDSESVPDPQPLGEPPAAPSGVGPNTMAAGGGAPMADNNEGADGVGSSSGNWHCDSTWLGDRVITTSTRTWALPTYNNHLYKQISNGTSGGATNDNTYFGYSTPWGYFDFNRFHCHFSPRDWQRLINNNWGFRPKRLSFKLFNIQVKEVTQNEGTKTIANNLTSTIQVFTDSEYQLPYVLGSAHQGCLPPFPADVFMIPQYGYLTLNNGSQAVGRSSFYCLEYFPSQMLRTGNNFQFTYTFEDVPFHSSYAHSQSLDRLMNPLIDQYLYYLSRTQTTSNGRGVTLGFSQGGPNTMANQAKNWLPGPCYRQQRVSTYPLSGTNQNFAWTAGTKYHLNGRNSLANPGIAMATHKDDEERFFPSNGILIFGKQNAARDNADYSDVMLTSEEEIKTTNPVATEEYGIVADNVMEPTRAPQIGTVNSQGALPGMVWQNRDVYLQGPIWAKIPHTDGNFHPSPLMGGFGLKHPPPQILIKNTPVPADPRSTFNGDKLNSFITQYSTGQVSVEIEWELQKENSKRWNPEIQYTSNYYKSTSVDFAVNTEGVYSEPRPIGTRYLTRNL

SEQ ID NO: 586 - protein, 736 aa, Artificial Sequence
  AAV capsid variant
MAADGYLPDWLEDNLSEGIREWWALKPGAPQPKANQQHQDNARGLVLPGYKYLGPGNGLDKGEPVNAADAAALEHDKAYDQQLKAGDNPYLKYNHADAEFQERLKEDTSFGGNLGRAVFQAKKRLLEPLGLVEEAAKTAPGKKRPVEQSPQEPDSSAGIGKSGAQPAKKRLNFGQTGDSESVPDPQPLGEPPAAPSGVGPNTMAAGGGAPMADNNEGADGVGSSSGNWHCDSTWLGDRVITTSTRTWALPTYNNHLYKQISNGTSGGATNDNTYFGYSTPWGYFDFNRFHCHFSPRDWQRLINNNWGFRPKRLSFKLFNIQVKEVTQNEGTKTIANNLTSTIQVFTDSEYQLPYVLGSAHQGCLPPFPADVFMIPQYGYLTLNNGSQAVGRSSFYCLEYFPSQMLRTGNNFQFTYTFEDVPFHSSYAHSQSLDRLMNPLIDQYLYYLSRTQTTSNGRGVTLGFSQGGPNTMANQAKNWLPGPCYRQQRVSTYPLRDGQLNFAWTAGTKYHLNGRNSLANPGIAMATHKDDEERFFPSNGILIFGKQNAARDNADYSDVMLTSEEEIKTTNPVATEEYGIVADNVMEPTRAPQIGTVNSQGALPGMVWQNRDVYLQGPIWAKIPHTDGNFHPSPLMGGFGLKHPPPQILIKNTPVPADPRSTFNGDKLNSFITQYSTGQVSVEIEWELQKENSKRWNPEIQYTSNYYKSTSVDFAVNTEGVYSEPRPIGTRYLTRNL

SEQ ID NO: 587 - protein, 736 aa, Artificial Sequence
  AAV capsid variant
MAADGYLPDWLEDNLSEGIREWWALKPGAPQPKANQQHQDNARGLVLPGYKYLGPGNGLDKGEPVNAADAAALEHDKAYDQQLKAGDNPYLKYNHADAEFQERLKEDTSFGGNLGRAVFQAKKRLLEPLGLVEEAAKTAPGKKRPVEQSPQEPDSSAGIGKSGAQPAKKRLNFGQTGDSESVPDPQPLGEPPAAPSGVGPNTMAAGGGAPMADNNEGADGVGSSSGNWHCDSTWLGDRVITTSTRTWALPTYNNHLYKQISNGTSGGATNDNTYFGYSTPWGYFDFNRFHCHFSPRDWQRLINNNWGFRPKRLSFKLFNIQVKEVTQNEGTKTIANNLTSTIQVFTDSEYQLPYVLGSAHQGCLPPFPADVFMIPQYGYLTLNNGSQAVGRSSFYCLEYFPSQMLRTGNNFQFTYTFEDVPFHSSYAHSQSLDRLMNPLIDQYLYYLSRTQTTSNGRGVTLGFSQGGPNTMANQAKNWLPGPCYRQQRVSTYPLADTGTNFAWTAGTKYHLNGRNSLANPGIAMATHKDDEERFFPSNGILIFGKQNAARDNADYSDVMLTSEEEIKTTNPVATEEYGIVADNVMEPTRAPQIGTVNSQGALPGMVWQNRDVYLQGPIWAKIPHTDGNFHPSPLMGGFGLKHPPPQILIKNTPVPADPRSTFNGDKLNSFITQYSTGQVSVEIEWELQKENSKRWNPEIQYTSNYYKSTSVDFAVNTEGVYSEPRPIGTRYLTRNL

SEQ ID NO: 588 - protein, 738 aa, Artificial Sequence
  AAV capsid variant
MAADGYLPDWLEDNLSEGIREWWALKPGAPKPKANQQKQDDGRGLVLPGYKYLGPFNGLDKGEPVNAADAAALEHDKAYDQQLQAGDNPYLRYNHADAEFQERLQEDTSFGGNLGRAVFQAKKRVLEPLGLVEEGAKTAPGKKRPVEPSPQRSPDSSTGIGKKGQQPARKRLNFGQTGDSESVPDPQPLGEPPAAPSGVGPNTMAAGGGAPMADNNEGADGVGSSSGNWHCDSTWLGDRVITTSTRTWALPTYNNHLYKQISNGTSGGATNDNTYFGYSTPWGYFDFNRFHCHFSPRDWQRLINNNWGFRPKRLSFKLFNIQVKEVTQNEGTKTIANNLTSTIQVFTDSEYQLPYVLGSAHQGCLPPFPADVFMIPQYGYLTLNNGSQAVGRSSFYCLEYFPSQMLRTGNNFQFTYTFEDVPFHSSYAHSQSLDRLMNPLIDQYLYYLSRTQTTGGTANTQTLGFSQGGPNTMANQAKNWLPGPCYRQQRVSTYPLNGGVVNFAWTAGTKYHLNGRNSLANPGIAMATHKDDEERFFPSNGILIFGKQNAARDNADYSDVMLTSEEEIKTTNPVATEEYGIVADNLQQQNTAPQIGTVNSQGALPGMVWQNRDVYLQGPIWAKIPHTDGNFHPSPLMGGFGLKHPPPQILIKNTPVPADPRSTFNGDKLNSFITQYSTGQVSVEIEWELQKENSKRWNPEIQYTSNYYKSTSVDFAVNTEGVYSEPRPIGTRYLTRNL

SEQ ID NO: 589 - protein, 738 aa, Artificial Sequence
  AAV capsid variant
MAADGYLPDWLEDNLSEGIREWWALKPGAPKPKANQQKQDDGRGLVLPGYKYLGPFNGLDKGEPVNAADAAALEHDKAYDQQLQAGDNPYLRYNHADAEFQERLQEDTSFGGNLGRAVFQAKKRVLEPLGLVEEGAKTAPGKKRPVEPSPQRSPDSSTGIGKKGQQPARKRLNFGQTGDSESVPDPQPLGEPPAAPSGVGPNTMAAGGGAPMADNNEGADGVGSSSGNWHCDSTWLGDRVITTSTRTWALPTYNNHLYKQISNGTSGGATNDNTYFGYSTPWGYFDFNRFHCHFSPRDWQRLINNNWGFRPKRLSFKLFNIQVKEVTQNEGTKTIANNLTSTIQVFTDSEYQLPYVLGSAHQGCLPPFPADVFMIPQYGYLTLNNGSQAVGRSSFYCLEYFPSQMLRTGNNFQFTYTFEDVPFHSSYAHSQSLDRLMNPLIDQYLYYLSRTQTTGGTANTQTLGFSQGGPNTMANQAKNWLPGPCYRQQRVSTYPLEMPIGNFAWTAGTKYHLNGRNSLANPGIAMATHKDDEERFFPSNGILIFGKQNAARDNADYSDVMLTSEEEIKTTNPVATEEYGIVADNLQQQNTAPQIGTVNSQGALPGMVWQNRDVYLQGPIWAKIPHTDGNFHPSPLMGGFGLKHPPPQILIKNTPVPADPRSTFNGDKLNSFITQYSTGQVSVEIEWELQKENSKRWNPEIQYTSNYYKSTSVDFAVNTEGVYSEPRPIGTRYLTRNL

SEQ ID NO: 590 - protein, 739 aa, Artificial Sequence
  AAV capsid variant
MAADGYLPDWLEDNLSEGIREWWALKPGAPKPKANQQKQDDGRGLVLPGYKYLGPFNGLDKGEPVNAADAAALEHDKAYDQQLQAGDNPYLRYNHADAEFQERLQEDTSFGGNLGRAVFQAKKRVLEPLGLVEEGAKTAPGKKRPVEPSPQRSPDSSTGIGKKGQQPARKRLNFGQTGDSESVPDPQPLGEPPAAPSGVGPNTMAAGGGAPMADNNEGADGVGSSSGNWHCDSTWLGDRVITTSTRTWALPTYNNHLYKQISNGTSGGATNDNTYFGYSTPWGYFDFNRFHCHFSPRDWQRLINNNWGFRPKRLSFKLFNIQVKEVTQNEGTKTIANNLTSTIQVFTDSEYQLPYVLGSAHQGCLPPFPADVFMIPQYGYLTLNNGSQAVGRSSFYCLEYFPSQMLRTGNNFQFTYTFEDVPFHSSYAHSQSLDRLMNPLIDQYLYYLSRTQTTGGTANTQTLGFSQGGPNTMANQAKNWLPGPCYRQQRVSTYPLEDMGTINFAWTAGTKYHLNGRNSLANPGIAMATHKDDEERFFPSNGILIFGKQNAARDNADYSDVMLTSEEEIKTTNPVATEEYGIVADNLQQQNTAPQIGTVNSQGALPGMVWQNRDVYLQGPIWAKIPHTDGNFHPSPLMGGFGLKHPPPQILIKNTPVPADPRSTFNGDKLNSFITQYSTGQVSVEIEWELQKENSKRWNPEIQYTSNYYKSTSVDFAVNTEGVYSEPRPIGTRYLTRNL

SEQ ID NO: 591 - protein, 737 aa, Artificial Sequence
  AAV capsid variant
MAADGYLPDWLEDNLSEGIREWWALKPGAPKPKANQQKQDDGRGLVLPGYKYLGPFNGLDKGEPVNAADAAALEHDKAYDQQLQAGDNPYLRYNHADAEFQERLQEDTSFGGNLGRAVFQAKKRVLEPLGLVEEGAKTAPGKKRPVEPSPQRSPDSSTGIGKKGQQPARKRLNFGQTGDSESVPDPQPLGEPPAAPSGVGPNTMAAGGGAPMADNNEGADGVGSSSGNWHCDSTWLGDRVITTSTRTWALPTYNNHLYKQISNGTSGGATNDNTYFGYSTPWGYFDFNRFHCHFSPRDWQRLINNNWGFRPKRLSFKLFNIQVKEVTQNEGTKTIANNLTSTIQVFTDSEYQLPYVLGSAHQGCLPPFPADVFMIPQYGYLTLNNGSQAVGRSSFYCLEYFPSQMLRTGNNFQFTYTFEDVPFHSSYAHSQSLDRLMNPLIDQYLYYLSRTQTTSNGRGVTLGFSQGGPNTMANQAKNWLPGPCYRQQRVSTYPLNGGVVNFAWTAGTKYHLNGRNSLANPGIAMATHKDDEERFFPSNGILIFGKQNAARDNADYSDVMLTSEEEIKTTNPVATEEYGIVADNLQQQNTAPQIGTVNSQGALPGMVWQNRDVYLQGPIWAKIPHTDGNFHPSPLMGGFGLKHPPPQILIKNTPVPADPRSTFNGDKLNSFITQYSTGQVSVEIEWELQKENSKRWNPEIQYTSNYYKSTSVDFAVNTEGVYSEPRPIGTRYLTRNL

SEQ ID NO: 592 - protein, 737 aa, Artificial Sequence
  AAV capsid variant
MAADGYLPDWLEDNLSEGIREWWALKPGAPKPKANQQKQDDGRGLVLPGYKYLGPFNGLDKGEPVNAADAAALEHDKAYDQQLQAGDNPYLRYNHADAEFQERLQEDTSFGGNLGRAVFQAKKRVLEPLGLVEEGAKTAPGKKRPVEPSPQRSPDSSTGIGKKGQQPARKRLNFGQTGDSESVPDPQPLGEPPAAPSGVGPNTMAAGGGAPMADNNEGADGVGSSSGNWHCDSTWLGDRVITTSTRTWALPTYNNHLYKQISNGTSGGATNDNTYFGYSTPWGYFDFNRFHCHFSPRDWQRLINNNWGFRPKRLSFKLFNIQVKEVTQNEGTKTIANNLTSTIQVFTDSEYQLPYVLGSAHQGCLPPFPADVFMIPQYGYLTLNNGSQAVGRSSFYCLEYFPSQMLRTGNNFQFTYTFEDVPFHSSYAHSQSLDRLMNPLIDQYLYYLSRTQTTSNGRGVTLGFSQGGPNTMANQAKNWLPGPCYRQQRVSTYPLEMPIGNFAWTAGTKYHLNGRNSLANPGIAMATHKDDEERFFPSNGILIFGKQNAARDNADYSDVMLTSEEEIKTTNPVATEEYGIVADNLQQQNTAPQIGTVNSQGALPGMVWQNRDVYLQGPIWAKIPHTDGNFHPSPLMGGFGLKHPPPQILIKNTPVPADPRSTFNGDKLNSFITQYSTGQVSVEIEWELQKENSKRWNPEIQYTSNYYKSTSVDFAVNTEGVYSEPRPIGTRYLTRNL

SEQ ID NO: 593 - protein, 738 aa, Artificial Sequence
  AAV capsid variant
MAADGYLPDWLEDNLSEGIREWWALKPGAPKPKANQQKQDDGRGLVLPGYKYLGPFNGLDKGEPVNAADAAALEHDKAYDQQLQAGDNPYLRYNHADAEFQERLQEDTSFGGNLGRAVFQAKKRVLEPLGLVEEGAKTAPGKKRPVEPSPQRSPDSSTGIGKKGQQPARKRLNFGQTGDSESVPDPQPLGEPPAAPSGVGPNTMAAGGGAPMADNNEGADGVGSSSGNWHCDSTWLGDRVITTSTRTWALPTYNNHLYKQISNGTSGGATNDNTYFGYSTPWGYFDFNRFHCHFSPRDWQRLINNNWGFRPKRLSFKLFNIQVKEVTQNEGTKTIANNLTSTIQVFTDSEYQLPYVLGSAHQGCLPPFPADVFMIPQYGYLTLNNGSQAVGRSSFYCLEYFPSQMLRTGNNFQFTYTFEDVPFHSSYAHSQSLDRLMNPLIDQYLYYLSRTQTTSNGRGVTLGFSQGGPNTMANQAKNWLPGPCYRQQRVSTYPLEDMGTINFAWTAGTKYHLNGRNSLANPGIAMATHKDDEERFFPSNGILIFGKQNAARDNADYSDVMLTSEEEIKTTNPVATEEYGIVADNLQQQNTAPQIGTVNSQGALPGMVWQNRDVYLQGPIWAKIPHTDGNFHPSPLMGGFGLKHPPPQILIKNTPVPADPRSTFNGDKLNSFITQYSTGQVSVEIEWELQKENSKRWNPEIQYTSNYYKSTSVDFAVNTEGVYSEPRPIGTRYLTRNL

SEQ ID NO: 594 - protein, 738 aa, Artificial Sequence
  AAV capsid variant
MAADGYLPDWLEDNLSEGIREWWALKPGAPKPKANQQKQDDGRGLVLPGYKYLGPFNGLDKGEPVNAADAAALEHDKAYDQQLQAGDNPYLRYNHADAEFQERLQEDTSFGGNLGRAVFQAKKRVLEPLGLVEEGAKTAPGKKRPVEPSPQRSPDSSTGIGKKGQQPARKRLNFGQTGDSESVPDPQPLGEPPAAPSGVGPNTMAAGGGAPMADNNEGADGVGSSSGNWHCDSTWLGDRVITTSTRTWALPTYNNHLYKQISNGTSGGATNDNTYFGYSTPWGYFDFNRFHCHFSPRDWQRLINNNWGFRPKRLSFKLFNIQVKEVTQNEGTKTIANNLTSTIQVFTDSEYQLPYVLGSAHQGCLPPFPADVFMIPQYGYLTLNNGSQAVGRSSFYCLEYFPSQMLRTGNNFQFTYTFEDVPFHSSYAHSQSLDRLMNPLIDQYLYYLSRTQTTGGTANTQTLGFSQGGPNTMANQAKNWLPGPCYRQQRVSTYPLNGGVVNFAWTAGTKYHLNGRNSLANPGIAMATHKDDEERFFPSNGILIFGKQNAARDNADYSDVMLTSEEEIKTTNPVATEEYGIVADNVMEPTRAPQIGTVNSQGALPGMVWQNRDVYLQGPIWAKIPHTDGNFHPSPLMGGFGLKHPPPQILIKNTPVPADPRSTFNGDKLNSFITQYSTGQVSVEIEWELQKENSKRWNPEIQYTSNYYKSTSVDFAVNTEGVYSEPRPIGTRYLTRNL

SEQ ID NO: 595 - protein, 738 aa, Artificial Sequence
  AAV capsid variant
MAADGYLPDWLEDNLSEGIREWWALKPGAPKPKANQQKQDDGRGLVLPGYKYLGPFNGLDKGEPVNAADAAALEHDKAYDQQLQAGDNPYLRYNHADAEFQERLQEDTSFGGNLGRAVFQAKKRVLEPLGLVEEGAKTAPGKKRPVEPSPQRSPDSSTGIGKKGQQPARKRLNFGQTGDSESVPDPQPLGEPPAAPSGVGPNTMAAGGGAPMADNNEGADGVGSSSGNWHCDSTWLGDRVITTSTRTWALPTYNNHLYKQISNGTSGGATNDNTYFGYSTPWGYFDFNRFHCHFSPRDWQRLINNNWGFRPKRLSFKLFNIQVKEVTQNEGTKTIANNLTSTIQVFTDSEYQLPYVLGSAHQGCLPPFPADVFMIPQYGYLTLNNGSQAVGRSSFYCLEYFPSQMLRTGNNFQFTYTFEDVPFHSSYAHSQSLDRLMNPLIDQYLYYLSRTQTTGGTANTQTLGFSQGGPNTMANQAKNWLPGPCYRQQRVSTYPLEMPIGNFAWTAGTKYHLNGRNSLANPGIAMATHKDDEERFFPSNGILIFGKQNAARDNADYSDVMLTSEEEIKTTNPVATEEYGIVADNVMEPTRAPQIGTVNSQGALPGMVWQNRDVYLQGPIWAKIPHTDGNFHPSPLMGGFGLKHPPPQILIKNTPVPADPRSTFNGDKLNSFITQYSTGQVSVEIEWELQKENSKRWNPEIQYTSNYYKSTSVDFAVNTEGVYSEPRPIGTRYLTRNL

SEQ ID NO: 596 - protein, 739 aa, Artificial Sequence
  AAV capsid variant
MAADGYLPDWLEDNLSEGIREWWALKPGAPKPKANQQKQDDGRGLVLPGYKYLGPFNGLDKGEPVNAADAAALEHDKAYDQQLQAGDNPYLRYNHADAEFQERLQEDTSFGGNLGRAVFQAKKRVLEPLGLVEEGAKTAPGKKRPVEPSPQRSPDSSTGIGKKGQQPARKRLNFGQTGDSESVPDPQPLGEPPAAPSGVGPNTMAAGGGAPMADNNEGADGVGSSSGNWHCDSTWLGDRVITTSTRTWALPTYNNHLYKQISNGTSGGATNDNTYFGYSTPWGYFDFNRFHCHFSPRDWQRLINNNWGFRPKRLSFKLFNIQVKEVTQNEGTKTIANNLTSTIQVFTDSEYQLPYVLGSAHQGCLPPFPADVFMIPQYGYLTLNNGSQAVGRSSFYCLEYFPSQMLRTGNNFQFTYTFEDVPFHSSYAHSQSLDRLMNPLIDQYLYYLSRTQTTGGTANTQTLGFSQGGPNTMANQAKNWLPGPCYRQQRVSTYPLEDMGTINFAWTAGTKYHLNGRNSLANPGIAMATHKDDEERFFPSNGILIFGKQNAARDNADYSDVMLTSEEEIKTTNPVATEEYGIVADNVMEPTRAPQIGTVNSQGALPGMVWQNRDVYLQGPIWAKIPHTDGNFHPSPLMGGFGLKHPPPQILIKNTPVPADPRSTFNGDKLNSFITQYSTGQVSVEIEWELQKENSKRWNPEIQYTSNYYKSTSVDFAVNTEGVYSEPRPIGTRYLTRNL

SEQ ID NO: 597 - protein, 737 aa, Artificial Sequence
  AAV capsid variant
MAADGYLPDWLEDNLSEGIREWWALKPGAPKPKANQQKQDDGRGLVLPGYKYLGPFNGLDKGEPVNAADAAALEHDKAYDQQLQAGDNPYLRYNHADAEFQERLQEDTSFGGNLGRAVFQAKKRVLEPLGLVEEGAKTAPGKKRPVEPSPQRSPDSSTGIGKKGQQPARKRLNFGQTGDSESVPDPQPLGEPPAAPSGVGPNTMAAGGGAPMADNNEGADGVGSSSGNWHCDSTWLGDRVITTSTRTWALPTYNNHLYKQISNGTSGGATNDNTYFGYSTPWGYFDFNRFHCHFSPRDWQRLINNNWGFRPKRLSFKLFNIQVKEVTQNEGTKTIANNLTSTIQVFTDSEYQLPYVLGSAHQGCLPPFPADVFMIPQYGYLTLNNGSQAVGRSSFYCLEYFPSQMLRTGNNFQFTYTFEDVPFHSSYAHSQSLDRLMNPLIDQYLYYLSRTQTTSNGRGVTLGFSQGGPNTMANQAKNWLPGPCYRQQRVSTYPLNGGVVNFAWTAGTKYHLNGRNSLANPGIAMATHKDDEERFFPSNGILIFGKQNAARDNADYSDVMLTSEEEIKTTNPVATEEYGIVADNVMEPTRAPQIGTVNSQGALPGMVWQNRDVYLQGPIWAKIPHTDGNFHPSPLMGGFGLKHPPPQILIKNTPVPADPRSTFNGDKLNSFITQYSTGQVSVEIEWELQKENSKRWNPEIQYTSNYYKSTSVDFAVNTEGVYSEPRPIGTRYLTRNL

SEQ ID NO: 598 - protein, 737 aa, Artificial Sequence
  AAV capsid variant
MAADGYLPDWLEDNLSEGIREWWALKPGAPKPKANQQKQDDGRGLVLPGYKYLGPFNGLDKGEPVNAADAAALEHDKAYDQQLQAGDNPYLRYNHADAEFQERLQEDTSFGGNLGRAVFQAKKRVLEPLGLVEEGAKTAPGKKRPVEPSPQRSPDSSTGIGKKGQQPARKRLNFGQTGDSESVPDPQPLGEPPAAPSGVGPNTMAAGGGAPMADNNEGADGVGSSSGNWHCDSTWLGDRVITTSTRTWALPTYNNHLYKQISNGTSGGATNDNTYFGYSTPWGYFDFNRFHCHFSPRDWQRLINNNWGFRPKRLSFKLFNIQVKEVTQNEGTKTIANNLTSTIQVFTDSEYQLPYVLGSAHQGCLPPFPADVFMIPQYGYLTLNNGSQAVGRSSFYCLEYFPSQMLRTGNNFQFTYTFEDVPFHSSYAHSQSLDRLMNPLIDQYLYYLSRTQTTSNGRGVTLGFSQGGPNTMANQAKNWLPGPCYRQQRVSTYPLEMPIGNFAWTAGTKYHLNGRNSLANPGIAMATHKDDEERFFPSNGILIFGKQNAARDNADYSDVMLTSEEEIKTTNPVATEEYGIVADNVMEPTRAPQIGTVNSQGALPGMVWQNRDVYLQGPIWAKIPHTDGNFHPSPLMGGFGLKHPPPQILIKNTPVPADPRSTFNGDKLNSFITQYSTGQVSVEIEWELQKENSKRWNPEIQYTSNYYKSTSVDFAVNTEGVYSEPRPIGTRYLTRNL

SEQ ID NO: 599 - protein, 738 aa, Artificial Sequence
  AAV capsid variant
MAADGYLPDWLEDNLSEGIREWWALKPGAPKPKANQQKQDDGRGLVLPGYKYLGPFNGLDKGEPVNAADAAALEHDKAYDQQLQAGDNPYLRYNHADAEFQERLQEDTSFGGNLGRAVFQAKKRVLEPLGLVEEGAKTAPGKKRPVEPSPQRSPDSSTGIGKKGQQPARKRLNFGQTGDSESVPDPQPLGEPPAAPSGVGPNTMAAGGGAPMADNNEGADGVGSSSGNWHCDSTWLGDRVITTSTRTWALPTYNNHLYKQISNGTSGGATNDNTYFGYSTPWGYFDFNRFHCHFSPRDWQRLINNNWGFRPKRLSFKLFNIQVKEVTQNEGTKTIANNLTSTIQVFTDSEYQLPYVLGSAHQGCLPPFPADVFMIPQYGYLTLNNGSQAVGRSSFYCLEYFPSQMLRTGNNFQFTYTFEDVPFHSSYAHSQSLDRLMNPLIDQYLYYLSRTQTTSNGRGVTLGFSQGGPNTMANQAKNWLPGPCYRQQRVSTYPLEDMGTINFAWTAGTKYHLNGRNSLANPGIAMATHKDDEERFFPSNGILIFGKQNAARDNADYSDVMLTSEEEIKTTNPVATEEYGIVADNVMEPTRAPQIGTVNSQGALPGMVWQNRDVYLQGPIWAKIPHTDGNFHPSPLMGGFGLKHPPPQILIKNTPVPADPRSTFNGDKLNSFITQYSTGQVSVEIEWELQKENSKRWNPEIQYTSNYYKSTSVDFAVNTEGVYSEPRPIGTRYLTRNL

SEQ ID NO: 600 - protein, 737 aa, Artificial Sequence
  AAV capsid variant
MAADGYLPDWLEDNLSEGIREWWALKPGAPQPKANQQHQDNARGLVLPGYKYLGPGNGLDKGEPVNAADAAALEHDKAYDQQLKAGDNPYLKYNHADAEFQERLKEDTSFGGNLGRAVFQAKKRLLEPLGLVEEAAKTAPGKKRPVEQSPQEPDSSAGIGKSGAQPAKKRLNFGQTGDSESVPDPQPLGEPPAAPSGVGPNTMAAGGGAPMADNNEGADGVGSSSGNWHCDSTWLGDRVITTSTRTWALPTYNNHLYKQISNGTSGGATNDNTYFGYSTPWGYFDFNRFHCHFSPRDWQRLINNNWGFRPKRLSFKLFNIQVKEVTQNEGTKTIANNLTSTIQVFTDSEYQLPYVLGSAHQGCLPPFPADVFMIPQYGYLTLNNGSQAVGRSSFYCLEYFPSQMLRTGNNFQFTYTFEDVPFHSSYAHSQSLDRLMNPLIDQYLYYLSRTQTTGGTANTQTLGFSQGGPNTMANQAKNWLPGPCYRQQRVSTYPLNGGVVNFAWTAGTKYHLNGRNSLANPGIAMATHKDDEERFFPSNGILIFGKQNAARDNADYSDVMLTSEEEIKTTNPVATEEYGIVADNLQQQNTAPQIGTVNSQGALPGMVWQNRDVYLQGPIWAKIPHTDGNFHPSPLMGGFGLKHPPPQILIKNTPVPADPRSTFNGDKLNSFITQYSTGQVSVEIEWELQKENSKRWNPEIQYTSNYYKSTSVDFAVNTEGVYSEPRPIGTRYLTRNL

SEQ ID NO: 601 - protein, 737 aa, Artificial Sequence
  AAV capsid variant
MAADGYLPDWLEDNLSEGIREWWALKPGAPQPKANQQHQDNARGLVLPGYKYLGPGNGLDKGEPVNAADAAALEHDKAYDQQLKAGDNPYLKYNHADAEFQERLKEDTSFGGNLGRAVFQAKKRLLEPLGLVEEAAKTAPGKKRPVEQSPQEPDSSAGIGKSGAQPAKKRLNFGQTGDSESVPDPQPLGEPPAAPSGVGPNTMAAGGGAPMADNNEGADGVGSSSGNWHCDSTWLGDRVITTSTRTWALPTYNNHLYKQISNGTSGGATNDNTYFGYSTPWGYFDFNRFHCHFSPRDWQRLINNNWGFRPKRLSFKLFNIQVKEVTQNEGTKTIANNLTSTIQVFTDSEYQLPYVLGSAHQGCLPPFPADVFMIPQYGYLTLNNGSQAVGRSSFYCLEYFPSQMLRTGNNFQFTYTFEDVPFHSSYAHSQSLDRLMNPLIDQYLYYLSRTQTTGGTANTQTLGFSQGGPNTMANQAKNWLPGPCYRQQRVSTYPLEMPIGNFAWTAGTKYHLNGRNSLANPGIAMATHKDDEERFFPSNGILIFGKQNAARDNADYSDVMLTSEEEIKTTNPVATEEYGIVADNLQQQNTAPQIGTVNSQGALPGMVWQNRDVYLQGPIWAKIPHTDGNFHPSPLMGGFGLKHPPPQILIKNTPVPADPRSTFNGDKLNSFITQYSTGQVSVEIEWELQKENSKRWNPEIQYTSNYYKSTSVDFAVNTEGVYSEPRPIGTRYLTRNL

SEQ ID NO: 602 - protein, 738 aa, Artificial Sequence
  AAV capsid variant
MAADGYLPDWLEDNLSEGIREWWALKPGAPQPKANQQHQDNARGLVLPGYKYLGPGNGLDKGEPVNAADAAALEHDKAYDQQLKAGDNPYLKYNHADAEFQERLKEDTSFGGNLGRAVFQAKKRLLEPLGLVEEAAKTAPGKKRPVEQSPQEPDSSAGIGKSGAQPAKKRLNFGQTGDSESVPDPQPLGEPPAAPSGVGPNTMAAGGGAPMADNNEGADGVGSSSGNWHCDSTWLGDRVITTSTRTWALPTYNNHLYKQISNGTSGGATNDNTYFGYSTPWGYFDFNRFHCHFSPRDWQRLINNNWGFRPKRLSFKLFNIQVKEVTQNEGTKTIANNLTSTIQVFTDSEYQLPYVLGSAHQGCLPPFPADVFMIPQYGYLTLNNGSQAVGRSSFYCLEYFPSQMLRTGNNFQFTYTFEDVPFHSSYAHSQSLDRLMNPLIDQYLYYLSRTQTTGGTANTQTLGFSQGGPNTMANQAKNWLPGPCYRQQRVSTYPLEDMGTINFAWTAGTKYHLNGRNSLANPGIAMATHKDDEERFFPSNGILIFGKQNAARDNADYSDVMLTSEEEIKTTNPVATEEYGIVADNLQQQNTAPQIGTVNSQGALPGMVWQNRDVYLQGPIWAKIPHTDGNFHPSPLMGGFGLKHPPPQILIKNTPVPADPRSTFNGDKLNSFITQYSTGQVSVEIEWELQKENSKRWNPEIQYTSNYYKSTSVDFAVNTEGVYSEPRPIGTRYLTRNL

SEQ ID NO: 603 - protein, 736 aa, Artificial Sequence
  AAV capsid variant
MAADGYLPDWLEDNLSEGIREWWALKPGAPQPKANQQHQDNARGLVLPGYKYLGPGNGLDKGEPVNAADAAALEHDKAYDQQLKAGDNPYLKYNHADAEFQERLKEDTSFGGNLGRAVFQAKKRLLEPLGLVEEAAKTAPGKKRPVEQSPQEPDSSAGIGKSGAQPAKKRLNFGQTGDSESVPDPQPLGEPPAAPSGVGPNTMAAGGGAPMADNNEGADGVGSSSGNWHCDSTWLGDRVITTSTRTWALPTYNNHLYKQISNGTSGGATNDNTYFGYSTPWGYFDFNRFHCHFSPRDWQRLINNNWGFRPKRLSFKLFNIQVKEVTQNEGTKTIANNLTSTIQVFTDSEYQLPYVLGSAHQGCLPPFPADVFMIPQYGYLTLNNGSQAVGRSSFYCLEYFPSQMLRTGNNFQFTYTFEDVPFHSSYAHSQSLDRLMNPLIDQYLYYLSRTQTTSNGRGVTLGFSQGGPNTMANQAKNWLPGPCYRQQRVSTYPLNGGVVNFAWTAGTKYHLNGRNSLANPGIAMATHKDDEERFFPSNGILIFGKQNAARDNADYSDVMLTSEEEIKTTNPVATEEYGIVADNLQQQNTAPQIGTVNSQGALPGMVWQNRDVYLQGPIWAKIPHTDGNFHPSPLMGGFGLKHPPPQILIKNTPVPADPRSTFNGDKLNSFITQYSTGQVSVEIEWELQKENSKRWNPEIQYTSNYYKSTSVDFAVNTEGVYSEPRPIGTRYLTRNL

SEQ ID NO: 604 - protein, 736 aa, Artificial Sequence
  AAV capsid variant
MAADGYLPDWLEDNLSEGIREWWALKPGAPQPKANQQHQDNARGLVLPGYKYLGPGNGLDKGEPVNAADAAALEHDKAYDQQLKAGDNPYLKYNHADAEFQERLKEDTSFGGNLGRAVFQAKKRLLEPLGLVEEAAKTAPGKKRPVEQSPQEPDSSAGIGKSGAQPAKKRLNFGQTGDSESVPDPQPLGEPPAAPSGVGPNTMAAGGGAPMADNNEGADGVGSSSGNWHCDSTWLGDRVITTSTRTWALPTYNNHLYKQISNGTSGGATNDNTYFGYSTPWGYFDFNRFHCHFSPRDWQRLINNNWGFRPKRLSFKLFNIQVKEVTQNEGTKTIANNLTSTIQVFTDSEYQLPYVLGSAHQGCLPPFPADVFMIPQYGYLTLNNGSQAVGRSSFYCLEYFPSQMLRTGNNFQFTYTFEDVPFHSSYAHSQSLDRLMNPLIDQYLYYLSRTQTTSNGRGVTLGFSQGGPNTMANQAKNWLPGPCYRQQRVSTYPLEMPIGNFAWTAGTKYHLNGRNSLANPGIAMATHKDDEERFFPSNGILIFGKQNAARDNADYSDVMLTSEEEIKTTNPVATEEYGIVADNLQQQNTAPQIGTVNSQGALPGMVWQNRDVYLQGPIWAKIPHTDGNFHPSPLMGGFGLKHPPPQILIKNTPVPADPRSTFNGDKLNSFITQYSTGQVSVEIEWELQKENSKRWNPEIQYTSNYYKSTSVDFAVNTEGVYSEPRPIGTRYLTRNL

SEQ ID NO: 605 - protein, 737 aa, Artificial Sequence
  AAV capsid variant
MAADGYLPDWLEDNLSEGIREWWALKPGAPQPKANQQHQDNARGLVLPGYKYLGPGNGLDKGEPVNAADAAALEHDKAYDQQLKAGDNPYLKYNHADAEFQERLKEDTSFGGNLGRAVFQAKKRLLEPLGLVEEAAKTAPGKKRPVEQSPQEPDSSAGIGKSGAQPAKKRLNFGQTGDSESVPDPQPLGEPPAAPSGVGPNTMAAGGGAPMADNNEGADGVGSSSGNWHCDSTWLGDRVITTSTRTWALPTYNNHLYKQISNGTSGGATNDNTYFGYSTPWGYFDFNRFHCHFSPRDWQRLINNNWGFRPKRLSFKLFNIQVKEVTQNEGTKTIANNLTSTIQVFTDSEYQLPYVLGSAHQGCLPPFPADVFMIPQYGYLTLNNGSQAVGRSSFYCLEYFPSQMLRTGNNFQFTYTFEDVPFHSSYAHSQSLDRLMNPLIDQYLYYLSRTQTTSNGRGVTLGFSQGGPNTMANQAKNWLPGPCYRQQRVSTYPLEDMGTINFAWTAGTKYHLNGRNSLANPGIAMATHKDDEERFFPSNGILIFGKQNAARDNADYSDVMLTSEEEIKTTNPVATEEYGIVADNLQQQNTAPQIGTVNSQGALPGMVWQNRDVYLQGPIWAKIPHTDGNFHPSPLMGGFGLKHPPPQILIKNTPVPADPRSTFNGDKLNSFITQYSTGQVSVEIEWELQKENSKRWNPEIQYTSNYYKSTSVDFAVNTEGVYSEPRPIGTRYLTRNL

SEQ ID NO: 606 - protein, 737 aa, Artificial Sequence
  AAV capsid variant
MAADGYLPDWLEDNLSEGIREWWALKPGAPQPKANQQHQDNARGLVLPGYKYLGPGNGLDKGEPVNAADAAALEHDKAYDQQLKAGDNPYLKYNHADAEFQERLKEDTSFGGNLGRAVFQAKKRLLEPLGLVEEAAKTAPGKKRPVEQSPQEPDSSAGIGKSGAQPAKKRLNFGQTGDSESVPDPQPLGEPPAAPSGVGPNTMAAGGGAPMADNNEGADGVGSSSGNWHCDSTWLGDRVITTSTRTWALPTYNNHLYKQISNGTSGGATNDNTYFGYSTPWGYFDFNRFHCHFSPRDWQRLINNNWGFRPKRLSFKLFNIQVKEVTQNEGTKTIANNLTSTIQVFTDSEYQLPYVLGSAHQGCLPPFPADVFMIPQYGYLTLNNGSQAVGRSSFYCLEYFPSQMLRTGNNFQFTYTFEDVPFHSSYAHSQSLDRLMNPLIDQYLYYLSRTQTTGGTANTQTLGFSQGGPNTMANQAKNWLPGPCYRQQRVSTYPLNGGVVNFAWTAGTKYHLNGRNSLANPGIAMATHKDDEERFFPSNGILIFGKQNAARDNADYSDVMLTSEEEIKTTNPVATEEYGIVADNVMEPTRAPQIGTVNSQGALPGMVWQNRDVYLQGPIWAKIPHTDGNFHPSPLMGGFGLKHPPPQILIKNTPVPADPRSTFNGDKLNSFITQYSTGQVSVEIEWELQKENSKRWNPEIQYTSNYYKSTSVDFAVNTEGVYSEPRPIGTRYLTRNL

SEQ ID NO: 607 - protein, 737 aa, Artificial Sequence
  AAV capsid variant
MAADGYLPDWLEDNLSEGIREWWALKPGAPQPKANQQHQDNARGLVLPGYKYLGPGNGLDKGEPVNAADAAALEHDKAYDQQLKAGDNPYLKYNHADAEFQERLKEDTSFGGNLGRAVFQAKKRLLEPLGLVEEAAKTAPGKKRPVEQSPQEPDSSAGIGKSGAQPAKKRLNFGQTGDSESVPDPQPLGEPPAAPSGVGPNTMAAGGGAPMADNNEGADGVGSSSGNWHCDSTWLGDRVITTSTRTWALPTYNNHLYKQISNGTSGGATNDNTYFGYSTPWGYFDFNRFHCHFSPRDWQRLINNNWGFRPKRLSFKLFNIQVKEVTQNEGTKTIANNLTSTIQVFTDSEYQLPYVLGSAHQGCLPPFPADVFMIPQYGYLTLNNGSQAVGRSSFYCLEYFPSQMLRTGNNFQFTYTFEDVPFHSSYAHSQSLDRLMNPLIDQYLYYLSRTQTTGGTANTQTLGFSQGGPNTMANQAKNWLPGPCYRQQRVSTYPLEMPIGNFAWTAGTKYHLNGRNSLANPGIAMATHKDDEERFFPSNGILIFGKQNAARDNADYSDVMLTSEEEIKTTNPVATEEYGIVADNVMEPTRAPQIGTVNSQGALPGMVWQNRDVYLQGPIWAKIPHTDGNFHPSPLMGGFGLKHPPPQILIKNTPVPADPRSTFNGDKLNSFITQYSTGQVSVEIEWELQKENSKRWNPEIQYTSNYYKSTSVDFAVNTEGVYSEPRPIGTRYLTRNL

SEQ ID NO: 608 - protein, 738 aa, Artificial Sequence
  AAV capsid variant
MAADGYLPDWLEDNLSEGIREWWALKPGAPQPKANQQHQDNARGLVLPGYKYLGPGNGLDKGEPVNAADAAALEHDKAYDQQLKAGDNPYLKYNHADAEFQERLKEDTSFGGNLGRAVFQAKKRLLEPLGLVEEAAKTAPGKKRPVEQSPQEPDSSAGIGKSGAQPAKKRLNFGQTGDSESVPDPQPLGEPPAAPSGVGPNTMAAGGGAPMADNNEGADGVGSSSGNWHCDSTWLGDRVITTSTRTWALPTYNNHLYKQISNGTSGGATNDNTYFGYSTPWGYFDFNRFHCHFSPRDWQRLINNNWGFRPKRLSFKLFNIQVKEVTQNEGTKTIANNLTSTIQVFTDSEYQLPYVLGSAHQGCLPPFPADVFMIPQYGYLTLNNGSQAVGRSSFYCLEYFPSQMLRTGNNFQFTYTFEDVPFHSSYAHSQSLDRLMNPLIDQYLYYLSRTQTTGGTANTQTLGFSQGGPNTMANQAKNWLPGPCYRQQRVSTYPLEDMGTINFAWTAGTKYHLNGRNSLANPGIAMATHKDDEERFFPSNGILIFGKQNAARDNADYSDVMLTSEEEIKTTNPVATEEYGIVADNVMEPTRAPQIGTVNSQGALPGMVWQNRDVYLQGPIWAKIPHTDGNFHPSPLMGGFGLKHPPPQILIKNTPVPADPRSTFNGDKLNSFITQYSTGQVSVEIEWELQKENSKRWNPEIQYTSNYYKSTSVDFAVNTEGVYSEPRPIGTRYLTRNL

SEQ ID NO: 609 - protein, 736 aa, Artificial Sequence
  AAV capsid variant
MAADGYLPDWLEDNLSEGIREWWALKPGAPQPKANQQHQDNARGLVLPGYKYLGPGNGLDKGEPVNAADAAALEHDKAYDQQLKAGDNPYLKYNHADAEFQERLKEDTSFGGNLGRAVFQAKKRLLEPLGLVEEAAKTAPGKKRPVEQSPQEPDSSAGIGKSGAQPAKKRLNFGQTGDSESVPDPQPLGEPPAAPSGVGPNTMAAGGGAPMADNNEGADGVGSSSGNWHCDSTWLGDRVITTSTRTWALPTYNNHLYKQISNGTSGGATNDNTYFGYSTPWGYFDFNRFHCHFSPRDWQRLINNNWGFRPKRLSFKLFNIQVKEVTQNEGTKTIANNLTSTIQVFTDSEYQLPYVLGSAHQGCLPPFPADVFMIPQYGYLTLNNGSQAVGRSSFYCLEYFPSQMLRTGNNFQFTYTFEDVPFHSSYAHSQSLDRLMNPLIDQYLYYLSRTQTTSNGRGVTLGFSQGGPNTMANQAKNWLPGPCYRQQRVSTYPLNGGVVNFAWTAGTKYHLNGRNSLANPGIAMATHKDDEERFFPSNGILIFGKQNAARDNADYSDVMLTSEEEIKTTNPVATEEYGIVADNVMEPTRAPQIGTVNSQGALPGMVWQNRDVYLQGPIWAKIPHTDGNFHPSPLMGGFGLKHPPPQILIKNTPVPADPRSTFNGDKLNSFITQYSTGQVSVEIEWELQKENSKRWNPEIQYTSNYYKSTSVDFAVNTEGVYSEPRPIGTRYLTRNL

SEQ ID NO: 610 - protein, 736 aa, Artificial Sequence
  AAV capsid variant
MAADGYLPDWLEDNLSEGIREWWALKPGAPQPKANQQHQDNARGLVLPGYKYLGPGNGLDKGEPVNAADAAALEHDKAYDQQLKAGDNPYLKYNHADAEFQERLKEDTSFGGNLGRAVFQAKKRLLEPLGLVEEAAKTAPGKKRPVEQSPQEPDSSAGIGKSGAQPAKKRLNFGQTGDSESVPDPQPLGEPPAAPSGVGPNTMAAGGGAPMADNNEGADGVGSSSGNWHCDSTWLGDRVITTSTRTWALPTYNNHLYKQISNGTSGGATNDNTYFGYSTPWGYFDFNRFHCHFSPRDWQRLINNNWGFRPKRLSFKLFNIQVKEVTQNEGTKTIANNLTSTIQVFTDSEYQLPYVLGSAHQGCLPPFPADVFMIPQYGYLTLNNGSQAVGRSSFYCLEYFPSQMLRTGNNFQFTYTFEDVPFHSSYAHSQSLDRLMNPLIDQYLYYLSRTQTTSNGRGVTLGFSQGGPNTMANQAKNWLPGPCYRQQRVSTYPLEMPIGNFAWTAGTKYHLNGRNSLANPGIAMATHKDDEERFFPSNGILIFGKQNAARDNADYSDVMLTSEEEIKTTNPVATEEYGIVADNVMEPTRAPQIGTVNSQGALPGMVWQNRDVYLQGPIWAKIPHTDGNFHPSPLMGGFGLKHPPPQILIKNTPVPADPRSTFNGDKLNSFITQYSTGQVSVEIEWELQKENSKRWNPEIQYTSNYYKSTSVDFAVNTEGVYSEPRPIGTRYLTRNL

SEQ ID NO: 611 - protein, 737 aa, Artificial Sequence
  AAV capsid variant
MAADGYLPDWLEDNLSEGIREWWALKPGAPQPKANQQHQDNARGLVLPGYKYLGPGNGLDKGEPVNAADAAALEHDKAYDQQLKAGDNPYLKYNHADAEFQERLKEDTSFGGNLGRAVFQAKKRLLEPLGLVEEAAKTAPGKKRPVEQSPQEPDSSAGIGKSGAQPAKKRLNFGQTGDSESVPDPQPLGEPPAAPSGVGPNTMAAGGGAPMADNNEGADGVGSSSGNWHCDSTWLGDRVITTSTRTWALPTYNNHLYKQISNGTSGGATNDNTYFGYSTPWGYFDFNRFHCHFSPRDWQRLINNNWGFRPKRLSFKLFNIQVKEVTQNEGTKTIANNLTSTIQVFTDSEYQLPYVLGSAHQGCLPPFPADVFMIPQYGYLTLNNGSQAVGRSSFYCLEYFPSQMLRTGNNFQFTYTFEDVPFHSSYAHSQSLDRLMNPLIDQYLYYLSRTQTTSNGRGVTLGFSQGGPNTMANQAKNWLPGPCYRQQRVSTYPLEDMGTINFAWTAGTKYHLNGRNSLANPGIAMATHKDDEERFFPSNGILIFGKQNAARDNADYSDVMLTSEEEIKTTNPVATEEYGIVADNVMEPTRAPQIGTVNSQGALPGMVWQNRDVYLQGPIWAKIPHTDGNFHPSPLMGGFGLKHPPPQILIKNTPVPADPRSTFNGDKLNSFITQYSTGQVSVEIEWELQKENSKRWNPEIQYTSNYYKSTSVDFAVNTEGVYSEPRPIGTRYLTRNL

SEQ ID NO: 612 - protein, 738 aa, Artificial Sequence; identical to SEQ ID NO: 422
  AAV capsid variant

SEQ ID NO: 613 - protein, 7 aa, Parvovirus Adeno-associated virus
SASTGAS

SEQ ID NO: 614 - protein, 10 aa, Parvovirus Adeno-associated virus
VFMIPQYGYL

SEQ ID NO: 615 - protein, 9 aa, Parvovirus Adeno-associated virus
NQSGSAQNK

SEQ ID NO: 616 - protein, 2 aa, Parvovirus Adeno-associated virus
SV

SEQ ID NO: 617 - protein, 8 aa, Parvovirus Adeno-associated virus
KTDNNNSN

SEQ ID NO: 618 - protein, 7 aa, Parvovirus Adeno-associated virus
KDDEDKF

SEQ ID NO: 619 - protein, 6 aa, Parvovirus Adeno-associated virus
SAGASN

SEQ ID NO: 620 - protein, 10 aa, Parvovirus Adeno-associated virus
STDPATGDVH

SEQ ID NO: 621 - protein, 2 aa, Parvovirus Adeno-associated virus
AN

SEQ ID NO: 622 - protein, 7 aa, Parvovirus Adeno-associated virus
DNNGLYT

SEQ ID NO: 623 - protein, 6 aa, Parvovirus Adeno-associated virus
SQSGAS

SEQ ID NO: 624 - protein, 10 aa, Parvovirus Adeno-associated virus
VFMVPQYGYL

SEQ ID NO: 625 - protein, 9 aa, Parvovirus Adeno-associated virus
TPSGTTTQS

SEQ ID NO: 626 - protein, 2 aa, Parvovirus Adeno-associated virus
RD

SEQ ID NO: 627 - protein, 8 aa, Parvovirus Adeno-associated virus
SADNNNSE

SEQ ID NO: 628 - protein, 7 aa, Parvovirus Adeno-associated virus
KDDEEKF

SEQ ID NO: 629 - protein, 6 aa, Parvovirus Adeno-associated virus
GSEKTN

SEQ ID NO: 630 - protein, 10 aa, Parvovirus Adeno-associated virus
NRQAATADVN

SEQ ID NO: 631 - protein, 2 aa, Parvovirus Adeno-associated virus
VN

SEQ ID NO: 632 - protein, 7 aa, Parvovirus Adeno-associated virus
DTNGVYS

SEQ ID NO: 633 - protein, 6 aa, Parvovirus Adeno-associated virus
SQSGAS

SEQ ID NO: 634 - protein, 10 aa, Parvovirus Adeno-associated virus
VFMVPQYGYL

SEQ ID NO: 635 - protein, 9 aa, Parvovirus Adeno-associated virus
TTSGTTNQS

SEQ ID NO: 636 - protein, 2 aa, Parvovirus Adeno-associated virus
SL

SEQ ID NO: 637 - protein, 8 aa, Parvovirus Adeno-associated virus
ANDNNNSN

SEQ ID NO: 638 - protein, 7 aa, Parvovirus Adeno-associated virus
KDDEEKF

SEQ ID NO: 639 - protein, 6 aa, Parvovirus Adeno-associated virus
GTTASN

SEQ ID NO: 640 - protein, 10 aa, Parvovirus Adeno-associated virus
NTAPTTGTVN

SEQ ID NO: 641 - protein, 2 aa, Parvovirus Adeno-associated virus
VN

SEQ ID NO: 642 - protein, 7 aa, Parvovirus Adeno-associated virus
DTNGVYS

SEQ ID NO: 643 - protein, 8 aa, Parvovirus Adeno-associated virus
RLGESLQS

SEQ ID NO: 644 - protein, 10 aa, Parvovirus Adeno-associated virus
VFMVPQYGYC

SEQ ID NO: 645 - protein, 9 aa, Parvovirus Adeno-associated virus
GTTLNAGTA

SEQ ID NO: 646 - protein, 2 aa, Parvovirus Adeno-associated virus
SN

SEQ ID NO: 647 - protein, 12 aa, Parvovirus Adeno-associated virus
ANQNYKIPATGS

SEQ ID NO: 648 - protein, 7 aa, Parvovirus Adeno-associated virus
GPADSKF

SEQ ID NO: 649 - protein, 6 aa, Parvovirus Adeno-associated virus
QNGNTA

SEQ ID NO: 650 - protein, 10 aa, Parvovirus Adeno-associated virus
SNLPTVDRLT

SEQ ID NO: 651 - protein, 2 aa, Parvovirus Adeno-associated virus
NS

SEQ ID NO: 652 - protein, 7 aa, Parvovirus Adeno-associated virus
DAAGKYT

SEQ ID NO: 653 - protein, 10 aa, Parvovirus Adeno-associated virus
EIKSGSVDGS

SEQ ID NO: 654 - protein, 10 aa, Parvovirus Adeno-associated virus
VFTLPQYGYA

SEQ ID NO: 655 - protein, 9 aa, Parvovirus Adeno-associated virus
STNNTGGVQ

SEQ ID NO: 656 - protein, 2 aa, Parvovirus Adeno-associated virus
AN

SEQ ID NO: 657 - protein, 7 aa, Parvovirus Adeno-associated virus
SGVNRAS

SEQ ID NO: 658 - protein, 7 aa, Parvovirus Adeno-associated virus
LQGSNTY

SEQ ID NO: 659 - protein, 8 aa, Parvovirus Adeno-associated virus
ANPGTTAT

SEQ ID NO: 660 - protein, 10 aa, Parvovirus Adeno-associated virus
TTAPATGTYN

SEQ ID NO: 661 - protein, 2 aa, Parvovirus Adeno-associated virus
QF

SEQ ID NO: 662 - protein, 7 aa, Parvovirus Adeno-associated virus
DSTGEYR

SEQ ID NO: 663 - protein, 7 aa, Parvovirus Adeno-associated virus
SASTGAS

SEQ ID NO: 664 - protein, 10 aa, Parvovirus Adeno-associated virus
VFMIPQYGYL

SEQ ID NO: 665 - protein, 9 aa, Parvovirus Adeno-associated virus
NQSGSAQNK

SEQ ID NO: 666 - protein, 2 aa, Parvovirus Adeno-associated virus
SV

SEQ ID NO: 667 - protein, 8 aa, Parvovirus Adeno-associated virus
KTDNNNSN

SEQ ID NO: 668 - protein, 7 aa, Parvovirus Adeno-associated virus
KDDKDKF

SEQ ID NO: 669 - protein, 6 aa, Parvovirus Adeno-associated virus
SAGASN

SEQ ID NO: 670 - protein, 10 aa, Parvovirus Adeno-associated virus
STDPATGDVH

SEQ ID NO: 671 - protein, 2 aa, Parvovirus Adeno-associated virus
AN

SEQ ID NO: 672 - protein, 7 aa, Parvovirus Adeno-associated virus
DNNGLYT

SEQ ID NO: 673 - protein, 7 aa, Parvovirus Adeno-associated virus
SETAGST

SEQ ID NO: 674 - protein, 10 aa, Parvovirus Adeno-associated virus
VFMIPQYGYL

SEQ ID NO: 675 - protein, 9 aa, Parvovirus Adeno-associated virus
NPGGTAGNR

SEQ ID NO: 676 - protein, 2 aa, Parvovirus Adeno-associated virus
AN

SEQ ID NO: 677 - protein, 8 aa, Parvovirus Adeno-associated virus
LDQNNNSN

SEQ ID NO: 678 - protein, 7 aa, Parvovirus Adeno-associated virus
KDDEDRF

SEQ ID NO: 679 - protein, 6 aa, Parvovirus Adeno-associated virus
GATNKT

SEQ ID NO: 680 - protein, 10 aa, Parvovirus Adeno-associated virus
NTAAQTQVVN

SEQ ID NO: 681 - protein, 2 aa, Parvovirus Adeno-associated virus
TG

SEQ ID NO: 682 - protein, 7 aa, Parvovirus Adeno-associated virus
DSQGVYS

SEQ ID NO: 683 - protein, 8 aa, Parvovirus Adeno-associated virus
NGTSGGAT

SEQ ID NO: 684 - protein, 10 aa, Parvovirus Adeno-associated virus
VFMIPQYGYL

SEQ ID NO: 685 - protein, 9 aa, Parvovirus Adeno-associated virus
TTGGTANTQ

SEQ ID NO: 686 - protein, 2 aa, Parvovirus Adeno-associated virus
AN

SEQ ID NO: 687 - protein, 8 aa, Parvovirus Adeno-associated virus
TGQNNNSN

SEQ ID NO: 688 - protein, 7 aa, Parvovirus Adeno-associated virus
KDDEERF

SEQ ID NO: 689 - protein, 6 aa, Parvovirus Adeno-associated virus
NAARDN

SEQ ID NO: 690 - protein, 11 aa, Parvovirus Adeno-associated virus
NTAPQIGTVNS

SEQ ID NO: 691 - protein, 2 aa, Parvovirus Adeno-associated virus
TS

SEQ ID NO: 692 - protein, 7 aa, Parvovirus Adeno-associated virus
NTEGVYS

SEQ ID NO: 693 - protein, 8 aa, Parvovirus Adeno-associated virus
NSTSGGSS

SEQ ID NO: 694 - protein, 10 aa, Parvovirus Adeno-associated virus
VFMIPQYGYL

SEQ ID NO: 695 - protein, 9 aa, Parvovirus Adeno-associated virus
INGSGQNQQ

SEQ ID NO: 696 - protein, 2 aa, Parvovirus Adeno-associated virus
AV

SEQ ID NO: 697 - protein, 8 aa, Parvovirus Adeno-associated virus
VTQNNNSE

SEQ ID NO: 698 - protein, 7 aa, Parvovirus Adeno-associated virus
KEGEDRF

SEQ ID NO: 699 - protein, 6 aa, Parvovirus Adeno-associated virus
GTGRDN

SEQ ID NO: 700 - protein, 10 aa, Parvovirus Adeno-associated virus
QAQAQTGWVQ

SEQ ID NO: 701 - protein, 2 aa, Parvovirus Adeno-associated virus
NN

SEQ ID NO: 702 - protein, 7 aa, Parvovirus Adeno-associated virus
NTEGVYS

SEQ ID NO: 703 - protein, 8 aa, Parvovirus Adeno-associated virus
NGTSGGST

SEQ ID NO: 704 - protein, 10 aa, Parvovirus Adeno-associated virus
VFMVPQYGYL

SEQ ID NO: 705 - protein, 9 aa, Parvovirus Adeno-associated virus
QTTGTGGTQ

SEQ ID NO: 706 - protein, 2 aa, Parvovirus Adeno-associated virus
AN

SEQ ID NO: 707 - protein, 8 aa, Parvovirus Adeno-associated virus
TNQNNNSN

SEQ ID NO: 708 - protein, 7 aa, Parvovirus Adeno-associated virus
KDDDDRF

SEQ ID NO: 709 - protein, 6 aa, Parvovirus Adeno-associated virus
GAGNDG

SEQ ID NO: 710 - protein, 10 aa, Parvovirus Adeno-associated virus
NTQAQTGLVH

SEQ ID NO: 711 - protein, 2 aa, Parvovirus Adeno-associated virus
TN

SEQ ID NO: 712 - protein, 7 aa, Parvovirus Adeno-associated virus
NTEGVYS

SEQ ID NO: 713 - protein, 8 aa, Parvovirus Adeno-associated virus
NGTSGGST

SEQ ID NO: 714 - protein, 10 aa, Parvovirus Adeno-associated virus
VFMIPQYGYL

SEQ ID NO: 715 - protein, 9 aa, Parvovirus Adeno-associated virus
STGGTAGTQ

SEQ ID NO: 716 - protein, 2 aa, Parvovirus Adeno-associated virus
SA

SEQ ID NO: 717 - protein, 8 aa, Parvovirus Adeno-associated virus
LSQNNNSN

SEQ ID NO: 718 - protein, 7 aa, Parvovirus Adeno-associated virus
KDDEERF

SEQ ID NO: 719 - protein, 6 aa, Parvovirus Adeno-associated virus
GAGKDN

SEQ ID NO: 720 - protein, 10 aa, Parvovirus Adeno-associated virus
NAAPIVGAVN

SEQ ID NO: 721 - protein, 2 aa, Parvovirus Adeno-associated virus
TN

SEQ ID NO: 722 - protein, 7 aa, Parvovirus Adeno-associated virus
NTDGTYS

SEQ ID NO: 723 - protein, 8 aa, Parvovirus Adeno-associated virus
NGTSGGST

SEQ ID NO: 724 - protein, 10 aa, Parvovirus Adeno-associated virus
VFMIPQYGYL

SEQ ID NO: 725 - protein, 9 aa, Parvovirus Adeno-associated virus
STGGTQGTQ

SEQ ID NO: 726 - protein, 2 aa, Parvovirus Adeno-associated virus
SA

SEQ ID NO: 727 - protein, 8 aa, Parvovirus Adeno-associated virus
LSQNNNSN

SEQ ID NO: 728 - protein, 7 aa, Parvovirus Adeno-associated virus
KDDEERF

SEQ ID NO: 729 - protein, 6 aa, Parvovirus Adeno-associated virus
GAGRDN

SEQ ID NO: 730 - protein, 10 aa, Parvovirus Adeno-associated virus
NTGPIVGNVN

SEQ ID NO: 731 - protein, 2 aa, Parvovirus Adeno-associated virus
TN

SEQ ID NO: 732 - protein, 7 aa, Parvovirus Adeno-associated virus
NTEGTYS

SEQ ID NO: 733 - protein, 8 aa, Parvovirus Adeno-associated virus
RLGTTSSS

SEQ ID NO: 734 - protein, 10 aa, Parvovirus Adeno-associated virus
VFMVPQYGYC

SEQ ID NO: 735 - protein, 9 aa, Parvovirus Adeno-associated virus
GETLNQGNA

SEQ ID NO: 736 - protein, 2 aa, Parvovirus Adeno-associated virus
AF

SEQ ID NO: 737 - protein, 12 aa, Parvovirus Adeno-associated virus
ASQNYKIPASGG

SEQ ID NO: 738 - protein, 7 aa, Parvovirus Adeno-associated virus
GPSDGDF

SEQ ID NO: 739 - protein, 6 aa, Parvovirus Adeno-associated virus
VTGNTT

SEQ ID NO: 740 - protein, 10 aa, Parvovirus Adeno-associated virus
TTAPITGNVT

SEQ ID NO: 741 - protein, 2 aa, Parvovirus Adeno-associated virus
SS

SEQ ID NO: 742 - protein, 7 aa, Parvovirus Adeno-associated virus
DTTGKYT

SEQ ID NO: 743 - protein, 8 aa, Parvovirus Adeno-associated virus
RIGTTANS

SEQ ID NO: 744 - protein, 10 aa, Parvovirus Adeno-associated virus
VFMVPQYGYC

SEQ ID NO: 745 - protein, 9 aa, Parvovirus Adeno-associated virus
GNSLNQGTA

SEQ ID NO: 746 - protein, 2 aa, Parvovirus Adeno-associated virus
AY

SEQ ID NO: 747 - protein, 12 aa, Parvovirus Adeno-associated virus
ANQNYKIPASGG

SEQ ID NO: 748 - protein, 7 aa, Parvovirus Adeno-associated virus
GAGDSDF

SEQ ID NO: 749 - protein, 6 aa, Parvovirus Adeno-associated virus
PSGNTT

SEQ ID NO: 750 - protein, 10 aa, Parvovirus Adeno-associated virus
TTAPHIANLD

SEQ ID NO: 751 - protein, 2 aa, Parvovirus Adeno-associated virus
NS

SEQ ID NO: 752 - protein, 7 aa, Parvovirus Adeno-associated virus
DNAGNYH

SEQ ID NO: 753 - protein, 8 aa, Parvovirus Adeno-associated virus
RLGTTSNS

SEQ ID NO: 754 - protein, 10 aa, Parvovirus Adeno-associated virus
VFMVPQYGYC

SEQ ID NO: 755 - protein, 9 aa, Parvovirus Adeno-associated virus
GETLNQGNA

SEQ ID NO: 756 - protein, 2 aa, Parvovirus Adeno-associated virus
AF

SEQ ID NO: 757 - protein, 12 aa, Parvovirus Adeno-associated virus
ASQNYKIPASGG

SEQ ID NO: 758 - protein, 7 aa, Parvovirus Adeno-associated virus
GPSDGDF

SEQ ID NO: 759 - protein, 6 aa, Parvovirus Adeno-associated virus
VTGNTT

SEQ ID NO: 760 - protein, 10 aa, Parvovirus Adeno-associated virus
TTAPITGNVT

SEQ ID NO: 761 - protein, 2 aa, Parvovirus Adeno-associated virus
SS

SEQ ID NO: 762 - protein, 7 aa, Parvovirus Adeno-associated virus
DTTGKYT

SEQ ID NO: 763 - protein, 8 aa, Parvovirus Adeno-associated virus
RLGSSNAS

SEQ ID NO: 764 - protein, 10 aa, Parvovirus Adeno-associated virus
VFMVPQYGYC

SEQ ID NO: 765 - protein, 9 aa, Parvovirus Adeno-associated virus
GGTLNQGNS

SEQ ID NO: 766 - protein, 2 aa, Parvovirus Adeno-associated virus
SG

SEQ ID NO: 767 - protein, 12 aa, Parvovirus Adeno-associated virus
ASQNYKIPQGRN

SEQ ID NO: 768 - protein, 7 aa, Parvovirus Adeno-associated virus
ANDATDF

SEQ ID NO: 769 - protein, 6 aa, Parvovirus Adeno-associated virus
ITGNTT

SEQ ID NO: 770 - protein, 10 aa, Parvovirus Adeno-associated virus
TTVPTVDDVD

SEQ ID NO: 771 - protein, 2 aa, Parvovirus Adeno-associated virus
DS

SEQ ID NO: 772 - protein, 7 aa, Parvovirus Adeno-associated virus
DNAGAYK

SEQ ID NO: 773 - protein, 8 aa, Parvovirus Adeno-associated virus
RIQGPSGG

SEQ ID NO: 774 - protein, 10 aa, Parvovirus Adeno-associated virus
IYTIPQYGYC

SEQ ID NO: 775 - protein, 9 aa, Parvovirus Adeno-associated virus
VSQAGSSGR

SEQ ID NO: 776 - protein, 2 aa, Parvovirus Adeno-associated virus
AA

SEQ ID NO: 777 - protein, 12 aa, Parvovirus Adeno-associated virus
ASNITKNNVFSV

SEQ ID NO: 778 - protein, 7 aa, Parvovirus Adeno-associated virus
FSGEPDR

SEQ ID NO: 779 - protein, 8 aa, Parvovirus Adeno-associated virus
VYDQTTAT

SEQ ID NO: 780 - protein, 10 aa, Parvovirus Adeno-associated virus
VTPGTRAAVN

SEQ ID NO: 781 - protein, 2 aa, Parvovirus Adeno-associated virus
AD

SEQ ID NO: 782 - protein, 7 aa, Parvovirus Adeno-associated virus
SDTGSYS

SEQ ID NO: 783 - protein, 736 aa, Artificial Sequence; identical to SEQ ID NO: 383
  Recombinant AAV capsid protein

SEQ ID NO: 784 - protein, 736 aa, Artificial Sequence; identical to SEQ ID NO: 382
  Recombinant AAV capsid protein

SEQ ID NO: 785 - protein, 736 aa, Artificial Sequnence; identical to SEQ ID NO: 385
  Recombinant AAV capsid protein

1. A recombinant adeno-associated virus (AAV) capsid protein, wherein the capsid protein comprises a substitution in an antigenic site of the AAV capsid protein, wherein the substitution has a sequence of any one of SEQ ID NO: 9, 10, 11, 12, 13, 14, 15, 16, 17, 297, 298, 299, or 411-421.

2. The recombinant AAV capsid protein of claim 1, wherein the substitution comprises a sequence of any one of SEQ ID NO: 9, 10, 14, or 17.

3. The recombinant AAV capsid protein of claim 1 or 2, wherein the AAV capsid protein comprises a first amino acid substitution and a second amino acid substitution, wherein the first amino acid substitution and the second amino acid substitution each modify a different antigenic site on the AAV capsid protein, wherein the first amino acid substitution and the second amino acid substitution each comprise any one of SEQ ID NO: 9, 10, 11, 12, 13, 14, 15, 16, 17, 297, 298, 299, or 411-421.

4. The recombinant AAV capsid protein of claim 1 or 2, wherein the AAV capsid protein comprises a first acid substitution, a second amino acid substitution, and a third amino acid substitution, wherein the first amino acid substitution, the second amino acid substitution, and the third amino acid substitution each modify a different antigenic site on the AAV capsid protein, wherein the first amino acid substitution, the second amino acid substitution and the third amino acid substitution each comprise any one of SEQ ID NO: 9, 10, 11, 12, 13, 14, 15, 16, 17, 297, 298, 299, or 411-421.

5. The recombinant AAV capsid of claim 4, wherein the first amino acid substitution comprises SEQ ID NO. 9; the second amino acid substitution comprises any one of SEQ ID NO. 10, 11, 12, 13, 14, 15, 16, 297, 298, 299, or 411-421; and the third amino acid substitution comprises SEQ ID NO. 17.

6. The recombinant AAV capsid of claim 5, wherein the first amino acid substitution comprises SEQ ID NO. 9; the second amino acid substitution comprises SEQ ID NO. 10; and the third amino acid substitution comprises SEQ ID NO. 17.

7. The recombinant AAV capsid of claim 5, wherein the first amino acid substitution comprises SEQ ID NO. 9; the second amino acid substitution comprises SEQ ID NO. 14; and the third amino acid substitution comprises SEQ ID NO. 17.

8. The recombinant AAV capsid protein of any one of claims 1-7, wherein the AAV capsid protein further comprises a substitution that modifies the HI loop of the capsid.

9. The recombinant AAV capsid protein of claim 8, wherein the AAV capsid comprises one or more of the following substitutions in the HI loop:
P661R, T662S, Q666G, S667D, wherein the numbering corresponds to the wildtype AAV8 capsid (SEQ ID NO: 6); or
P659R, T660S, A661T, K664G, wherein the numbering corresponds to the wildtype AAV9 capsid (SEQ ID NO: 7).

10. The recombinant AAV capsid protein of any one of claims 1 to 9, wherein the AAV capsid protein is of an AAV serotype selected from AAV1, AAV2, AAV3, AAV4, AAV5, AAV6, AAV7, AAV8, AAV9, AAV10, AAV11, AAV12, AAVrh.8, AAVrh.10, AAVrh32.33, AAVrh74, bovine AAV and avian AAV.

11. The recombinant AAV capsid protein of any one of claims 1 to 9, wherein the AAV capsid protein is chimeric.

12. The recombinant AAV capsid protein of claim 11, wherein the AAV capsid protein comprises sequences derived from two or more AAV serotypes.

13. The recombinant AAV capsid protein of claim 12, wherein the AAV capsid protein comprises sequences derived from three or more AAV serotypes.

14. The recombinant AAV capsid protein of any one of claims 1-10, wherein the AAV capsid protein comprises an amino acid sequence that has at least 90% sequence identity with any one of SEQ ID NOs: 18-80, 300-410, 422-612, or 783-785.

15. The recombinant AAV capsid protein of claim 14, wherein the AAV capsid protein comprises an amino acid sequence of any one of SEQ ID NOs: 18-80, 300-410, 422-612, or 783-785.

16. The recombinant AAV capsid protein of claim 15, wherein the AAV capsid protein comprises an amino acid sequence of SEQ ID NO: 380 or SEQ ID NO: 384.

17. The recombinant AAV capsid protein of any one of claims 1 to 16, wherein the modification of the one or more antigenic sites results in inhibition of binding by an antibody to the one or more antigenic sites.

18. The recombinant AAV capsid protein of any one of claims 1 to 17, wherein the modification of the one or more antigenic sites results in inhibition of neutralization of infectivity of a virus particle comprising said AAV capsid protein.

19. A recombinant AAV capsid protein comprising the amino acid sequence of SEQ ID NO: 49.

20. The recombinant AAV capsid protein of claim 19, wherein the AAV capsid protein is modified by replacing the region spanning amino acids 454-460 of SEQ ID NO: 49 with SEQ ID NO: 9.

21. The recombinant AAV capsid protein of any one of claim 19 or 20, wherein the AAV capsid protein is modified by replacing the region spanning amino acids 493-500 of SEQ ID NO: 49 with any one of SEQ ID NO: 10, 11, 12, 13, 14, 15, 16, 297, 298, 299, or 411-421.

22. The recombinant AAV capsid protein of any one of claims 19 to 21, wherein the AAV capsid protein is modified by replacing the region spanning amino acids 585-590 of SEQ ID NO: 49 with SEQ ID NO: 17.

23. The recombinant AAV capsid protein of any one of claims 19 to 22, wherein the AAV capsid protein is modified by replacing the region spanning amino acids 454-460 of SEQ ID NO: 49 with SEQ ID NO: 9, the region spanning amino acids 493-500 of SEQ ID NO: 49 with any one of SEQ ID NO: 10, 11, 12, 13, 14, 15, 16, 297, 298, 299, or 411-421, and the region spanning amino acids 585-590 of SEQ ID NO: 49 with SEQ ID NO: 17.

24. The recombinant AAV capsid protein of any one of claims 19 to 23, wherein the modification results in inhibition of binding by an antibody to the AAV capsid protein.

25. The recombinant AAV capsid protein of any one of claims 19 to 24, wherein the modification results in inhibition of neutralization of infectivity of a virus particle comprising the AAV capsid protein.

26. A recombinant AAV capsid protein comprising the amino acid sequence of any one of SEQ ID NO: 18-80, 300-410, 422-612, or 783-785.

27. A recombinant AAV capsid protein comprising the amino acid sequence of SEQ ID NO: 380 or SEQ ID NO: 384.

28. A nucleotide sequence encoding a recombinant AAV capsid protein of any one of claims 1 to 27.

29. The nucleotide sequence of claim 28, wherein the nucleotide sequence is a DNA sequence.

30. The nucleotide sequence of claim 28, wherein the nucleotide sequence is an RNA sequence.

31. An expression vector comprising the nucleotide sequence of any one of claims 28-30.

32. A cell comprising the nucleotide sequence of any one of claims 28-30, or the expression vector of claim 31.

33. An AAV viral vector comprising the recombinant capsid protein of any one of claims 1 to 27.

34. The AAV viral vector of claim 33, further comprising a cargo nucleic acid encapsidated by the capsid protein.

35. The AAV viral vector of claim 34, wherein the cargo nucleic acid encodes a therapeutic protein or RNA.

36. The AAV viral vector of any one of claims 34-35, wherein the cargo nucleic acid encodes a gene-editing molecule.

37. The AAV viral vector of claim 36, wherein the gene-editing molecule is a nuclease.

38. The AAV viral vector of claim 37, wherein the gene-editing molecule is a Cas9 nuclease.

39. The AAV viral vector of claim 37, wherein the gene-editing molecule is a Cpf1 nuclease.

40. The AAV viral vector of claim 36, wherein the gene-editing molecule is a single guide RNA.

41. A pharmaceutical composition comprising the AAV viral vector of any one of claims 33 to 40.

42. The pharmaceutical composition of claim 41, wherein the composition further comprises a pharmaceutically acceptable carrier.

43. A pharmaceutical composition comprising the cell of claim 32 or the expression vector of claim 31.

44. The pharmaceutical composition of claim 43 wherein the composition further comprises a pharmaceutically acceptable carrier.

45. A method of treating a patient in need thereof comprising administering to the patient a therapeutically effective amount of an AAV viral vector of any one of claims 33-40 or the pharmaceutical composition of any one of claims 41-44.

46. The method of claim 45, wherein the patient has a liver disease or disorder.

47. The method of claim 46, wherein the liver disease or disorder is primary biliary cirrhosis, nonalcoholic fatty liver disease (NAFLD), non-alcoholic steatohepatitis (NASH), autoimmune hepatitis, hepatitis B, hepatitis C, alcoholic liver disease, fibrosis, jaundice, primary sclerosing cholangitis (PSC), Budd-Chiari syndrome, hemochromatosis, Wilson's disease, alcoholic fibrosis, non-alcoholic fibrosis, liver steatosis, Gilbert's syndrome, biliary atresia, alpha-1-antitrypsin deficiency, alagille syndrome, progressive familial intrahepatic cholestasis, Hemophilia B, Hereditary Angioedema (HAE), Homozygous Familial Hypercholesterolemia (HoFH), Heterozygous Familial Hypercholesterolemia (HeFH), Von Gierke's Disease (GSD I), Hemophilia A, Methylmalonic Acidemia, Propionic Acidemia, Homocystinuria, Phenylketonuria (PKU), Tyrosinemia Type I, Arginase I Deficiency, Argininosuccinate Lyase Deficiency, Carbamoyl-phosphate synthetase 1 deficiency, Citrullinemia Type 1, Citrin Deficiency, Crigler-Najjar Syndrome Type 1, Cystinosis, Fabry Disease, Glycogen Storage Disease Ib, LPL Deficiency, N-Acetylglutamate Synthetase Deficiency, Ornithine Transcarbamylase Deficiency, Ornithine Translocase Deficiency, Primary Hyperoxaluria Type I, or ADA SCID.

48. The method of claim 46, wherein the liver disease or disorder is liver cancer or metastasis.

49. The method of any one of claims 45-48, wherein the patient is a mammal.

50. The method of claim 49, wherein the patient is a human.

51. A method of introducing a nucleic acid molecule into a cell, comprising contacting the cell with the AAV viral vector of any one of claims 33-40.

52. An AAV viral vector of any one of claims 33-40 for use as a medicament.

53. An AAV viral vector of any one of claims 33-40 for use in a method of treatment.
